United States Patent Application Publication US 2026/0027161 A1 - sequence listing, part 3

SEQ ID NO: 5 - DNA, 2973522 bp, Intestinicoccus colisanans (residues 1,486,762-2,973,522 of 2,973,522)
  source 1..2973522: mol_type = genomic DNA
ggactacaagtatctcgacggttacggtaagcaaaagaagctgcgcgcgacgcgcggggagcgtatcccggaagcactgctcggcgaagtgatctgcgagagccgttgggattatttgaatttgctgcccgaagacctgccggagccgtttacgacgaaaacgcttgcaaaagcgatgcgacgcgcgcagacgcaagcgcagtgtgcagcgaatgtgctgtattccatgggtgttttggagcgtgtgggtaaggagaaaaacgcatatttgtacgtgaaaaaacaggaagaataaaagcatatcgcttgcggcttttgaagctcggagcgatacgctttttggtgggggttgtttttctgaaggcggcgtttttgccgccttgggcgttgtcctaagaacccgcaagttttctcgaagaaaacttgacgaaagactcttagccatggttaccggaagcttaggcgtttaatttacggaagttcattttcagcgttcttgtactgcgcaggtgaggaacgttggcgtcggggcgatgcatgtatacgctttgtatcaggccgaagccgaggtacagacatacggcactgctgccgccggcagagaagaacggcaatgtgacgcccatgacgggcagaagcgccaggcacatgccgatatttgagacggactgtaaagcgatgagcccgaaaaagccgaagcacatgcagcgcccgaggtcgtccctcgcctttgacgcgatatacagcacgcgcaggagatacactaacaataatacgatgatggcggtgcagccgatgaagccgagctcctcaccggcaacggagaagataaaatcactgtgctggaacgtgacgaggtttgtttcgacacgcggaccgttaaacagccctttgccggtcagctggccgctgccgatggagatacgtccctgcacctgctggtagccttcattgagctgaatagatgggtcgtccagattatagacagatgtgaagcgcttgatctggtattcgctgagaacaaatttccacagcacgggcacggacacggcgacaagcgcgccgagcaaaatgaaatagcgcagctgcacaccgccgccgaggctcatgcacaggaacatgaagaaaaaaacgatcgcggcgccgtcatcaccctgaacatggcagagcagaacgggcaccgccgcgtggagcgcgagcagaacgacgtgcagagggtgattgattttattttgcacgcgcaaaacggagatgtgctttgcatacgtcagcataaagcagattttcacaagctcgctcgtctggaacgtgcggcccgcaaggctgatccacgcgcgcgcgttgacgccctcgctgccctgcacgctgatgccgaaaaacatggtgtagagcatgataaaaacggaaaaacccgcgatgagataccagaacgacgcaatgctttcgtaatcgatgaaggagagtacaagcgccgcgagaaggcccgcaacggtcacgacgagctgcgttttgaaataatccgtgttcatcgcgcgggaaacgcttttcagaagaataaggctgaacgtggatattgtgagcatcaaaagccaaagaagcttgtccgtacggcggaaaaaggacgaaacagcaaggaaaatgcggctgtctttcgtaagatcacctgctttcaaaaaaatcagaagaagccaaagtaaaacaaagcgtaaaagtctttgtaagatgttaggaataaaaagcaaaatttcaacaaaatttctattttagtatatcacacagaaaaggaaggggcaatatccagattttttccgttaaaaaagcgcgttcctctttacggaaacgcctttttgcgctataatctataaggcataacgatgtccgcatgctgcggcgtgcggcaaaacggaaaagaacggaaatgaaaggttggttgcaatgcttaccgatattgaaattgcgcaacagacaaaattaagaccgattgcggagatcgcggaagaactgcatgtatgtcccgaagagctggagccctacggacgctttaaagcaaagctgaatgatgacctgttcaaaagacttgaaaacgagccggacggcaagctgatccttgttacggccatcaacccgacgccggcgggcgagggcaagaccaccacaacggctggcctcggtcaggctatggcgaagatcggcaaaaaggccgtcatcgcgctgcgtgaaccgtctctgggtccggtgttcggcattaagggcggcgctgcgggcggcggctacgcacaggtgttgccgatggaggacatcaacctgcactttacgggtgacatgcacgccatcacttcggcaaataacctgctgtgcgccatgctcgataaccacatgcagcagggcaacgtgctgggcatcgaccagcgccgtgtgctcatcaagcgctgcgtcgatatgaacgaccgcgcgctgcgcagcattgtcatcggccttggcagtaaggtgaacggcatcccgcgcgaggacggctttatcatcaccgtcgcaagcgaggtcatggcgattttgtgtcttgcaaaggatttgaaagacctgaaagagcgcctcggcaaaatcctcattgcatatacgtatgacggcaagccggtctatgcgaaggacatcaaggcggatggcgccatgacggctttgctcaaagatgccatcaacccgaaccttgtgcagacgattgaaggcacaccggccatcatgcacggcggtccgtttgcaaacattgcgcacggctgcaactccgtgcgcgcaacgcgcttggcgctgaagctcggcgattactgcattacggaagcaggcttcggttccgacctcggtgcggagaagtttctcgacatcaagtgccgtttggcgggcctcaagccgaactgcatcgtcgttgtcgcgacggttcgtgcgctgaaatacaatggcggcgtgccgaaggcagagcttgcaaaggagaatgttccggcgctcgaaaagggcattgcgaacctgcgcgcacacgtggagaacatgcataaatataacgtgccggtcgtcgttgccattaaccgcttcggcaccgatacggatgcggagctgaaggttatcgacgattgctgcaagtcccttggtgtagagtatgcactctccgaagtgttcgcaaagggcggcgaaggcggcgtggagcttgcaaagaccgtctgcaaggtcatcgacgagaatccggaaagccactttgcgccgatctatgaccttgatctcacagtggaggagaagatccgcacgattgcgcagaaaatctacggcgcggatgacgtgacgttcacgaaccaggcgatgaagtccctgaaggacatcaaggcgctcggcggcgacgcgctgccggtgtgcatcgcaaagacgcagtattcgctttctgacgacccgacgctgctcggccgtccgaccggcttcaacattacgatccgtgacttgcgcctctcgaacggcgcgggcttcgtggttgcgtatgcgggcgatgtcatgacgatgcccggtctgccgaaggtgccgtctgccgaaaagatcgacgtcgacggtaacggcgtgatccacggcctgttctgatgcaacggtttgtttctcactcggtgcaggacaccgaaaaaatcgcggcgaagctggcggaaaagctcaagggcggcgaggtcatcgcgttcacgggatcgatgggcatgggcaagacggcgtttacgcgcggacttgtgctggcgcttggcggcggggacgtggtctccagtccgacgtttgcgcttgtgaacgaatacgatgcgcggctgacggtgcagcactttgacatgtaccgcgtttccggttgggacgatctctactccacgggctttttcgattacctcgatacggacaacgtgctcgtcattgagtggagcgaaaacatcgacggcgctttgccggaaaacacgatttatgtccacatggaaaagggcgagacggagacggagcgcatcgttaccattgagggcatagacctgtgataagtttctgatagaaaggacggcttttgcgcggcaaaaaatcgcgtgaaagcgacaaatatgctgattttagcactcgattcctctgcggcgccggcctcggccgcgcttttggaggacggaaaaatactctctgaattttatatcaacacaaagcagacgcacagccagacgctgatgccgatggtggaatctgttttgaagctcacgaataaaacgcttgacgatgtgacctgcatggcggtctccgccgggccgggttcgttcacgggggtgcgcatcggcgtctcctgcgtgaagggactttccatgacgcggaacatcccgtgcgcgggcgtttccacgctgcgcgccatggcggagaacgcacggcagctgacgggtatcgtctgtgctgtgatggacgcacgctgcgggcaggtgtataatgcgctgttccgtgcggaggacggtaagctcacacgtctttgtgatgaccgcgcactgcccattgcggagcttttggaagaatgcaaaacgtttacggagaagatttatctcgtcggcgatggcgcggagctttgctataagacgtttgcggctatccgtgcagagcttttgctgccgcagcttcgctttcagcgtgcctccggcgttgccatggcggcgcaggagatggttgaaaacgaacagacggttacgccggacgctttgatgccaatctacctgcgtctgccgcaggcggagcgtgaactgaaagccaaaaacgcacagaaaaacaataagtaatccatatacgaaggagaataaagcatgaagatcgcagttggttcggatcacggcggattcgctctgaaagaagccgtcaagaagcatttggaagcaaaaggcatcgaagtcgaagatttcggctgctattccacggagagcgtggactatgcggtgtacggcgcaaaggtcgcgcactgcgtggcagacggcaaggctgattacggcgtacttgtttgctccacgggcatcggtatttccatggccgcaaacaaggtgaagggcatccgcgcggcactgtgcagcgatacccacgcagcggaaatgacccgccgccacaacaatgcaaacattctgtgtctcggcggccttgtcaccgaggagaagaccgcgctggaaatcgtggacacgttccttaagtttgactttgagggcggtcgccaccagcgccgtatcgaccagatcgcagatattgaaaacggacgcctgtaaggcagaaatcggagaaatcaatatggaaaacaacgaacagatttttatcatgaaccacccgctcattcagcacaagctctctttcctgcgcgataagaacaccggcacaaaggaatttcgcgagcttgtcagcgagatcgcaacgctgatgtgctacgaagctacccgtgacctgccgctgatggacgtgcagacggagaccccgatgtgcaccgcaacgacaaaagtcatcgccggcagaaagctggcattcgtgccgattctgcgcgccggtctcggcatggtagacggcatgctgcagctcgttccgagcgcaaaggtcggccatatcggtctttaccgtgaccacgataccttgcagccggtcgaatactacaacaagctgccgtccgacattgaagagcgtgatgtcatcgtgcttgacccgatgctcgcgaccggcggttccgcaatggacgcaatcaccattgtaaagcgcagccgcccgcgcagtatcaagttcctgtgcatcattgcagcgccggagggcctcaaggcactgagcgaagcgcacccggacgtgcatatttactgtgcagccgttgatgagaagctcaacgaacacggttacattctgccgggcctcggcgacgcaggcgaccgtatcttcggcacgatgtaagctttcggaaaagtaaattttataagcaaacgctcatggagtgaaaatgaagaaggagccgtacccgaaagcgggcgcggctccttcgatttttatgttttgcgttttgcggggggattacagcagacgagtgtcgttgatgataagctcgaacgtgagtcccaaaagatcggcggcttttctgcacagcaccatacggtcgaggaaaatctcgaaatactccatgacggggcagatgtccgtatcaatcgtgatgttgaaaaggcaaagcttctgctctttgtcaattttcagcgaggcgttcacgacggcgtaattcacgcggtcgtgaatatccgttgcgataatcgcgtttttgcgcacgcgggaacgacgcacgtcgcttttatcggagaggatcagcgcggcagagacggcgtttaccgggaaagcggttttctcatcgtggtgaccgatagccgagcagatgatagcgatttcttccggcggcatgttcatgcgcgttaaaagcgtgaacgccataatggcgccgctgtgcgcgtggtcgacgcggtttaccgtgttgccgatatcgtgcagataaccggcgatggcggcaagctcgcaggtgcgcgtatcgtaatcaagcgcttccagaatgttccgcgcgtagttgctgcaccgcttggcgtgcgggcggccgtgctctgtgaagcccagtgcgccaaggcagctgttgcccgcctccacgtagaccttcacttcgggatttttaaaaatgtcctccggcatgatatgtgcatattccataacggtgcgctcctgaattcaaaatcagtccgctgtaaacatgcggtacatggcctcaaggcagatttgtgcgtgcagcttgaactgctccacgttgatgcactcgtttgcctggtgtgcgttcgattcttcttcatcgaacgatgcgccgaacgcaacgcctgcgccgcccatctggcgggcatacgtgccgccgcccatggagaagacgtcgcactttttgccggtgacgtcctcataagcgccggaaagcaggctgacgagcgggccgtccttcggcaggtacagcggcggctcatcggaaatgagcgtgtaggtgaggcctgtgccctccacggactttgcaaggatcttgtcaatctctgcgccggactttgttgccgggtagcgaatgtcgatatcgaagcggccctcgccgttttcgatgttcacaaggccgaggttgaaggtcagcgcaccgctcggctcatcggacatcttaacgccgatgttggagccgtcatatgcaaggccgactttctcatccataaacgtgagaaattcgccgcagtctgcgccgaaaacgttcacgagcaggtgtgcaaggtgtgcggcggcgttgatgccgatctccggggtagaagcgtgcgcggccttgccggttgcgacgatgtgtgcgccgctttcggtgcgtgtgatgtcgaacttcacttccgcagcgtttgcagcttcgacaagctttgcaaattcgtcgtcatcacagagcacgtcggcttctgccttgtacggcacggcgttgacaacagtaccggccttgaaggaaacgatcttcttgccgaccttgccggttacggcaaatcggaacaggcctttttcgcagtggcacacgccgtagcaggcgtccggggtgaagcccatggtgggcatctgctctttggagaagtagtgacccatatcctgcatgccgatctcctctgcggagccgagcacgacgcgcagcttgcgtttgccgacgacgcctgcttccttcagcgcgcgcaggcagtgcagtgcaacaattgccggacccttgttatcggaaacgccgcggccgaatgccttgccgtcgcggatgaccatggtgtacgggtcgctgtcccagccttcgccggccggcacgatgtcaaggtgcgccataacaacggcgttttcttcgccctcgccgagctctgcgtgcattgcataatagtcgctgttcttcgtcttaatgccgtatcgttccgcaatttctatcgccttatctacagcggttgctgcgtccttgccgaacggatacggaccgtcctgcggctgtgcgactgagggaatggcgatgatatcgccgaggtctttcattatatcgtcccagtaatcgagaattttttcaccgaacatgatacatttcatcctttccaaatgaatatacctctatcataatccatatttgtgttaaaatcaatcaaaactctgtaaatttccgcagagaaataaaatgaaaggggagggtaggatgctgaacggcatctggatggcgatgattgtgctggcgttcgtcggtgcggtgtgcacggggagatggacggcactttccgctgcggcggcggatggcgcaaggcaggcggtggagacggtgcttttgctgctcggcgcgatgtgcctttggacgggcatcatgcgtattgcgggggaggcggggcttacaaacgggctttccaaaattctgtcgccggttatcaagcgactgtttccgaattatggaaaaaatgaaaccgtgcgcgaaaaaatatcgatgaatattgccgcaaacatgctcggcatgggcaacgccgccacaccgtttggattgagcgccatggacgaaatgcagaaattacagacgggcgatgtgccgacgcaagagatgatcttattcgtcgtgatgaatacggcgtcgtttcagttgatcccctcggcggcggtcaccttaagggcttcctacggcagcgcggacccgtatgatgttctgccgcatgtttggcttgtttcattcggcagcctgctcgtctgcgtgctcatgtgccgcgtgtttcaaaaattgtggcgggcataggcgcggcggctgtctgcggcgtgatcgcgctcacggtcatgtgcgggtacgtaaaaggactgccggtatttgagctgttcacaaaaggcgcggcggagggcatgcatacggcgataaaattattgccgacactgctcggacttattgtcggcatttccatgctgcgcgcgtccggctttttagagctgttttccgcgctgctgcggcccgtgacagaagtgctgaacatccccacggagcttatgccgctcatcttactgcgcccgctttcgggcagcggctcggtgtcgtatgttacggagctttacagcgcatacggtgcggacagtgtaatatcccgattggcggcaattttatcgtcttcgacggaaacgacgttttacgcggccgcggtatatttttcgggtcgggggtataaaacgctgcgctacacgattccggcggcgctttgcggcgaccttgccgccgtgctgctcacgctgttttcggtgcggctttttgggtaaaactttttctgtacgtttttgtgtttttgtgatatactgctctcaaagaaatttgttttcggaggggaaaggtatgctgctggcactggacgtcggaaataccaacatcacactgggcgtttatgagggggaaaagctgctgttcgtcacgcgcatggcgacgaatccgccgcgcatggaggacgaatacgcttctgcaatgctcagcattttacatttatacaatatccacacgtcgcaggtgaacggcgcggttttaagctccgttgtgccgcggctgaccgatgacctcgcccgcgcggtgcgccgtgtttggaaggtggaaccgttcatcgtcagcgcgcagtctgtgccggagctgaaagtgaagcgcgatgtgccgaacacactcggcgccgacctcgttgtcggtgctgtggcggcaaaagccatgtaccacggcccgtgtatcgtcatcgatatgggtacggcaacgacgctgacaggtttaaacgccgacggcgaagtgtgcggcgtagtaatcattccgggcgtcggcacatcgcttgacgcattgacgagccgcgcagcgcagctttcttccgtcagtctgaccgcgccgccgcaggtgcttggccgcaacacgatggagtgtatccagtccggcatggtgttcggcacggcgtgtatgctggacggcctgtgcgaccgcattgaagatgagctcggcgcaccgtgcgaggtggtcgcaacgggcggcctcgcaggtcttatcgtaccgcattgcagccgcaagatcactttcagcgatacgcttctgctggacggcctgaaaattatctgggatgcgcacggggaaaagtaaaataaacgaataaggcagtgccgaatattcagggcactgccttaacgttttctttcggttgtcagtcttgtcttgccaatagaaacgctatatggtatactataaaatacgatttttctgcaaggagactacattttcatgaaagaaaagaaaaagatcccgtggggtcttatatacgtggggctgacggtggtcgtgatgatcgtgttcgggctcgtcaataccgaatttgcgggcatgttttccgtcatcgcaaatctttccctcgggtttgtggcgctcgccgtgctgatgaccggcgtgttcctcgtaacagagggcggcatcatccatatgctgctgcgcgcgcagggcgagcacgtcggcttttggacaacggtgaagattgggctcatcggcatttattattcttacatcacgccgagctccacgggcgggcagcctgcgcaggtcgtctacctgcggcgcgataaggtctcggtcggcaactccactgcggtgctgtttgtaaagttttttgcgtatcagcttgcgtttgtgctgtgcacggtggcatcgctgatttatatgtacccgagtttgaagcgggacgacccgcagctcattcccattgtgctgctcggcatcgccatcaacgggctgtggattatcgcgataccgcttttgtttagcccgaagatcttaaaaaagctgtgcggcggcgtgacaaagctgctcttgaaatgtacgtttctcaaaaagcgcgagaattacatagaaaaagtgcacggctttgaggcggatttctcctcctacacaatgaaattcagaagcaaaatgcgctatgtgctccttgcaattttgtggtcgatcccgcaggtcattttgcagatgagtgtgctgtacgtggtgttccgtgcgttttcactcgacctgccttacggcgaactgctttgtatgcagacgatgctgcaggcctccgtgtgctttatcccgctgcccggtgcgtctggcgcacaggagctcggcttctccatgttctttaaatcgtattttgcgtccggcgatattttgtacaccgccgtgcttgtctggcgattcttcacatattacatcatcgtgctgctcggcgcgctcgtcgtcgttatcgatcagctcgtgtttggttgccgcagaaagcaggaagcggcgctctctgcaggaaaagaataattcgactcgcttcggcgcagctcgtaggagttgcgctgtttttatgttcttttatgacatattctcatgcgccggaaaacattgacattcttctgccgtgtgtctataatgggctcggcagctgaaattcggaaaggccgcatttcagccgtgaaaaagaagaaaaaggagaaaaacacatgctgaacattcaaaactacacaaagcgcttcggtgacaaaatcgccgtagacgacctttcgctgcacattgcggcaggggaaatctgcgcgttcatcggacacaacggcgcgggcaaaacgactacgctaaaagcctgctgcggcttattaaagccggacggcggtaccattacggtgaacggcatcgacattcaaaaagaccccatcgcctgcaaaaaaatcatggcctacatacccgataatcctgatctttatgaattcctgacgggctacgagtatttgaattttgttgcggatatgtacggcgtatcggaagcggaccgcaaggcgcgcatggaagcgcttgccgagcggctggatattaaaaacgcgctgccgaacctcatctcggagtgctcgcacggcatgaagcagaaaatcgccgttatcggcgcgcttatccacgagccgaagctcattttgatggacgagccgttcgtcgggctcgaccccattgcggcgcacgaattaaaggagattatggcggagcattgccgaaacggcggcgccatcttcttctccacacacgttttggaggtggcggagaagctgtgcgacaatgtggccattattaaaaacggcaagctcattgcacacggcaccatggacagcgtgcgcggcgacggttctttggagcgggtcttcttagagctggaagaccacaaggactgaaagggggaggctgcatgttaagatccctctggaagctgcaatggaagcagtttgcggcgcgcatgaaaaaaggcaacggcaaaaagacctccggcggatggctggtttttctgatgctgttcattgtggtgtgtatggaaattttgatgtttgtggtgttcgcagcacttgttccgctgtgcgaaatggggcttacatggctgtatttcgccatggcgggcacaatggcgctggcgctttccatgctgggcagcgtttttatgacgcaggcgcagttgtatgacgcgaaagacaacgaacggttgctttccatgccgataccgccaaagtacattctcttgacgcgtattgcaatgctgttcacaacgacggcagggtacacgctggcagttttgctgcccgcgttcggtatttacgcgttttcctacggtgcatcggcgacgatgatgatcgggtggctgtttacatttgtggctctgagcctgatttcgcagtctgtctgctgtgcgctcggctgggtgctgcacaagctcctcagccgcctgcgcaacaaggcggttgtttcgcttttgtacatggtcatcttcatggcagtgtactggtatttttacgcgaacgtcaactcatttttgtccgggatcgtcatgcagggcacgcagatcgcgggtgcgatgaaatacgtttggccgctttatgctattggcatggcgtgcggcggaagccttttgcacacgctgctcgtgactgtattgagcgcggcaatagcgcttttcacgctttggcggctttccgcatctttcatttcctccgtgcgtacatcgggcgcgaaagcgggtgcaaagcacaaatcgggcaaagcttccgcaaagcagcgcacgccggtgctgtctgttgcgcataaggagcagcggaagttcttcacaagccccgcgtacctgatgaatttcggcttcggcctggtggtcattccggttctgcccatcgccgccgcgattttccgcgggaagctgatgcagatgataagcctgatgggcgttcgacccgagtggattgcgctcggcatttttggcgtgatggcgttttgcatcgcgacgtcctgcgcgaccgcgccgtctgtctcgttggagggcaaaaatctgtgggttctgcgcacgatgcccataagcggcaaaacggtgcttttgggcaagctccttatggtgtgccgcctgcaaatgccgcttgttgccgtcagtgttttggcgctttgcctcatcgccgggtgcggtatcgggctcacggtgctgaccgtttgcgtttgcgttttgttctgctggttcgtcggcacgctcggccttgtgatgaacctgctcgcgccgcgctttgattggcagagcgaaaatcagccgtgcaagcagtccctcagcgtatgcgtcacaatgttcggcgcgtacttctttgcggcggtgatcgtcggcgtgtttttcgcggtatctgcactgcatattccgggcattgcagcgtatgcggtaacgactgcgttccttttgctcttgtctgccttgatgcacctgcttttggtgtgttggggcgcaaaaaaatttgagcgcttagaagcctaaatcaaaataaaatcgagcgtctgcatacgtcttttggcggtgcagacgctttttcttgctttttttgcaaaatcatgctatgctgaaaccacttgatttggttggagggatttttatgatctacacgatcacatttaatccggcggtggattacgtcgtcacggcggacacgttccgcacgggcaaaacgaaccgcacgaaaacggaaaatattgtgtttggcggcaagggcgtgaacgtctctttgctgctgcacgcgttgaatacaaaaagcatcgcgcttgggtttattgcgggctttacgggcaaagcgctgcgcgagggcgttgaaaaagaaggcatcacgaccgatttcatcgaagtcgaaaacggctttacacgcatcaatttaaagctgcatgccgaggaagaaacggaactgaacggcagcggtccggagatttcagaaaacgagctcaaaaatttttttgaaaagctcggtgccttgaccccgcaggataccttggtgctttccggcagtgtgccgaagtcactgccaaaagacatttacgcacggattgcaaagcttgcgcaaacaaaaggcgtgcggctcattgtggatgccgcaggcgatttattattgtctacgcttgagtttcagccgttcctcgtaaagccgaaccgcgaggagctttccgagatgttccgtgccccggcggacacagaggaacaggtgacggcgcttgcggaggggctgaaaaaacgcggtgcaaaaaacgtgcttgtttccatggcgggcgacggtgcgcttttgtatacggaaacgggcgaggtgtattttgccccggcggcaaagggcacgctgataaactccaccggcgcgggtgattccatggtcggcggctttttggcggaattcacgcattccggcgattttgcaaaggcactcgccatgggcacggcggcgggcggcgcaacggcgttttccgtcggcatcgcgggctttcagaaaatcatggcggtgcatgaaagcgtgaaagctggggtgcagcgtgttcgatagttttctggtcgcgctgaatgcgatcatgccgacgtttttgcttttggcgttcggctactttttaaagcacaaaaacttcgtctcgtcggaatttttaaagcagacgaatacgctgacattcaaattttttctgccgtttctgctgtttaataacatctataaaacggagatcaccgaggccatcgacggcatgacgttcacaatcgcggtagggagcctactgttattgttcgcagtgctgtgcgtcgtcgtgccgcgtgtcgtgcgcgagccgaaacagcgcggcgtcatcattcagggactttttcgcagcaactacgtcatattcggcgtgagtctcgtcacgaacgtgttcggcgcggaggaggctgccgcggcctccatcttgagcgccgtgctcgtgccgatgtacaacgttttggccgtcattgcgctgacggtatttacgggcggaggtaaggtctcgctgaaaaagacgctcaaatccatcgcgacaaacccgctcattatcgcggcactgctcggtgtttttgcgtccatcattaaattgcgtttcccggcatttctggaaacgagcctgcgcgatgtttcgcgccttgccacaccgcttgcacttatcgtgctcggcggtgatttcagcttccgcaagctaaaaggcaacatgcgtattgcgggcgtgacggtgtttataaagctcgtcgtcattccgcttgtttttctgccgatcgcggttctggcgggcagcagagggccgagtcttctggcgcttgcacttgcgtgggaaacgccggtcgcggtatcaagctacatcatggcgcagcaggcgggcgcagatggcgaacttgccggtcagcttgttgttttgagcgctgtgtgctgcatcccgactgtatttttgatgatctttattttgcagagcatggcgttgctgtaaaagtaaaaacccgtttccggtaaaagcttcggaaacgggttttgtgctgtttaagttcattaaagatgctcgttcatttcgcggacatgcgcgcggattttttcaaagctctcctggctgatgacgtgctcaatgcggcaggcgtcctctgttgcaatgtccttcggcacgccgagataggtgagccaatcggaaagcaacttgtggcgctcatacatgcggttggcgatagcaaggccgtcctccgtcaagtgaatgtagccgtcgccgtctacggtgatcaaattgttctcgcgcagctttttcatggctacgctgacactgggttttgtaaaattgagctcgttggcaatatcaatagaacgcacataggtgctgcgctcggataagatcaaaatggtctcaagatagttttctgcggattcctgaattttcacggctgtctcctctcacaatcggggtggataaattcttataacagtataacacaaatccaaaaagagttcaattcccattttgtgcaaaatcgaaaataagttgcaggagaaaatgacagaaaaagtcaagacccgccggggggaaccggcaggtctcggcttttcttatttcaggagcgtagtacgcgtcgtactcaatttaaatgggaagatttattattctacatcctgcagggcgtcgtagccttcttcgcctgtacggactttgatgacattctccacgtcgtaaacgaagattttgccgtcaccgatgtgaccggtgtaaagcgctttcttcgccgtttcgatgaccgtgcggacaggaaccttagagatgacgacctccacctgtaccttaggcagcaggtttgcttctacgagcgtgccgcggtagtattccggcttgcccttctgaatgccgcagccgagtacgttcgtcaccgtcataccggtaataccgacgctcatcagtgcgttcttcaaggtatcgaaagctgcctgcttgcacacaatctcgaccttcgtcatcttcatgccggtgctttccgctttttcggtcttcacgggggcgtgatgcacaacgaccggcactgcttcgtctaccgcagctgggccgaacggggcaggggcaacgctgaggtctgcgctttcgagcgaggtgttgatggccggaacgaagtctgcatacgcatttgcaaggccatgctcgggcaggtcaaggcccataatctcttcttctctcgtcacacgcaggccgaccgtcgcgcggatgagcaggaacacaatggtaatcgtcacggctgtccaagcgcagaccgtaagcacaccaagcaattgttttgcaagcagtgcaatgccgccgccgtagaacaggccggtgaagctatcgttgccgggggctgtggtcgttgcaaaaagaccgactgcaatggtgccccaaatgccgttgcagaagtggacggcaaccgcgccgaccgggtcatcgacatggagcttatagtcgagcagccaaacgccgaacgggcaaaggagaccggccacaatgccgatgaatgtcgcgccgaggcagtctgttacatcacagccggcggtgatggcgaccagaccggcgagagaagcgttgagacacatggaaacatccggcttgccgtactttacccatgtgaaaatcatgcaggtgacggtcgctatggcaggtgagacggtggtggtgaggaagatggagccgagctgctcaacgcttgttgccgcagcaccgttgaagccgtaccagccgaaccaaagaatgaacacgccaaggcagccgagcggaatgttgtggcccgggaaggcattgacctttacgatcttgccgcttgcatccttttcgaacttgccgatgcgcgggccgagcagctttgcgccgatgagcgcggaaagaccgcctaccatgtggatggcgcaggagcctgcaaaatcatggaagccgagctgcgaaagccagccaccgccccagatccagtgtgcttcgatggggtataccaaagcggagataacaccggagtaaatgcagtaggaaaggaactttgtgcgttctgccattgcgccggaaacgatggtcgcggtcgtggcgcagaacacaaggttgaatacgaaattcgaccagtcaaagtttgcgtagtttgtgaaaatatcaaagcccggcttaccgatgaagcccagtaagtcttcgcccagcaaaaagctgaagccgatgagaatgaatacgccggtaccgatgcagaagtccatcaggttcttcatcaaaatgttgccggcattttttgcacgggtgaaacccgtttctaccatggcgaagccggcctgcatccagaagaccagcgccgcgcccatcaaaaaccagacgctgaagatctcgcttgtcatatgttcgtcctcctaagtttaagccctagtgatttgaaaatagaaaagggtgtgcacgtttggttcctgaaacggaaccccgtgcacacccttgtgcctatattgaatttttcatcccttgtccgtttgaaacggtatgttcaaagccccttatactctgaacatcagatcgccgtagctcgggtacggccagtaatcggaagagaccagcgtttccatctcgtccacaacggctctcagctcggtcatggcggtgatgacggaatccttataataggtcgcaacctcaatcggatcttcgccgacttccttcacgccgatgatggcgttatcgagcgcagcaagcttcttatatgcgcagtcctgcaggccggaaagacgcttgatgatatcaagctccgcttcgcacggaatgtcatcgctgatggccttcttcgtggcaacaccgcttgcaagctccgcaacataagaggaaacagcggggagaatatcgcgcttgaccatatcacttgcggtgagcgcttcgatgttgatggtcttcgcgtacgtttcgaggatgatgtcctgtctggactgcatctcgacttcggtgtagatcttatgctttgcaaagagcttcacgttcttttcgtcggtgtagtgcggcagtgcgtctaccgtggtcggcaggttcgtcaggccgcgtcttgcagcttcgaccttccaagcgtccgcatagccgtcgccgttaaagatgatacgcttgtgctctttgatgacacgcttgatgagtgcgttcagtgccgacatgaaatcatcgctcttgccctcaagctcgtctgcgaactgctcgagctcatcggcgataatcgtgttcagcatgatgttcgggcaggcgatgttgagctgcgagccgaggcttctgaactcgaacttgttgccggtgaaagcgaacggggaggttctgtttctgtccgttgtatcctttgtgaaggacggcagaacgtttacgccaatctccatgttgacgcggagtgtgccgccgtagaccgtgccggtctcaatggcgtgcaggatagctgtaagctcgtcgccgaggaagatggagatgatggccggcggcgcttcgtttgcgccgaggcgatgatcgttgcctgcggaagcgacggagacacgcagcagatcctgatactcgtcaacacccttgataacagcggcgaggaacaggagaaactgtgcattttcctgcggcagcttgcccggctcaaacagattcttgccggtatcggtggaaagtgaccagttgttgtgcttgccggagccgtttacgcctgcaaacggcttttcatgcagcaggcagacaaggccgtggcggagcgcaacgttcttcatcgtctccatggtcagctggttatggtcggtcgcaacgtttgtagtggagaagatcggcgccaactcgtgctgtgccggggcgacctcgttgtgctttgtcttagcaagcacgccgagcttccacagctcttcgtcgagctcctgcatgaacgcggcaattctcggcttgatcgcgccgaagtaatggtcttcaagctcctgacccttcggtgcgcgtgcaccgaacagcgtgcggcccgtgtaaatgaggtccgggcgctcatcgtagagctttttatcgacaaggaaatattcctgctccgggccgacggtcgtgatgacacgctttgtcgtggagtcgccgaaaaggcggaggatacgaacggcctgtgcgctcaacgcttccatggagcgcagcagcggggttttcttatccagcacctcgccgccgtaggaacagaacgccgtaggaatgtacagggagtgatctttaatgaatgcgtaggaggtcgggtcccatgcggtgtagccgcgggcttcaaacgttgcgcgcagaccgccggaagggaaggaagaagcatccggctcgcccttgatgagctccttgccggagaattccatgatgatgcggccgtctgccgtcggagaaatgaagctgtcgtgcttctcggcggtgatgccggtcatcggctggaaccagtgcgtgtagtgcgttgcacctttttcgatcgcccagtccttcatggcatttgccacagcattggcaaccgtgatgtcgaggtccttgccgttgtcaatggtctttctcaaagacttgtaaacgtccttcggcagtctctcacgcatgacgtcgtcgttaaacaccatgctggcgaaaatgtccggcacattgatctttgtcgtgctgctcatgtaaaccactctttccttcaataagattcgcataataggaggggcgaacgctgcgatataatttgtatatcttcccggcgtttcgtcctgcggcttcgctttacgaaaccgtctgcacagctgttcgtaattcattcaaacaaaaaagcgctggggatggcattgaaccaaccacagcgcctttgctatgctatgtgatgaattttacaacgtctcggaccatttgtcaacaccttttttgagaaaatttgaagatttgcaggatatgcaatttaaacctgcgttcataaattcattttatgaaatttttaaagtcaagcgaacataaaatgaaattgctacaactcaaaaattcaaaaatcgcaaaatttttcttgacatataagaagggccgctatataatggtaggcagacaatggagtctgatcatacatgttgcatctaaaagctgccgaatgcggggcttttagattgcgccggggggaacggcgcgcgtgcattgcacgcagcatgtatggtcagactttctctttttttcggaaaagccgggaaaaagacgtatatcttatttgttttcagaagggagcagtcttcatgcttagagaaggcaaaagcacagcgggcgatttccgaattccttcggggtgcgccgtatcctccgttttttcccgcagcggaaagcggttggacggctccgatatcatccgctccattgagatcatgcacgaccgttcaaacggccttggcggcggcttcgccggctacggcatttacccggaatatgcggaacagtatgcgttccacgttttctataataatgtaaaagcaaaagaggaatgtgagaagttcatcaacgagcatttcgatgtcgtgaacctttccaaaattccgatccgcaagattccgcagatcacggacgagccgcttatctggcggtacttcgtcacaccgctgcacacaaagcttgcggaaagccagctcgatgaagacgagttcaccgcccgctgcgtcaaccgcgtcaatacctttatcgatggcgcgtatattttctccagcggcaaaaacatgggcgtgtttaaggccgtcggctacccggaggatgtcggtcggttctatcgtctcgatgaatacgccggctactgttggacggcgcacggccgctacccgacgaatacccccggctggtggggcggtgcgcacccgtttgcgctgctcgacctttccgttgtccataacggcgaaatctcgtcctacgatgcgaaccgccgctgcattgagatgtacggctacaactgcaaccttttgaccgataccgaggtcatcacctatattttcgattatcttgtacgccgtcagggccttaccctgcaagaggtcgcaaacgtcatcgcggcaccgttctggacgaccattcagaacaaagacccggaggagcgcgcgcgtctgacgtatttgcgcaatgtgtattccggcctgctcgtcaccggtccgttctccattctggtcggctttacgggtggctttatggcactcaacgaccgcttaaagctgcgttctatggtcgtcggcgaaaagggcgatatggtctacatcgccagtgaggaatctgccatccgcgtcattcagcccacgctcgataaggtctgggcgcccgcaggcggcgagcctgtcatcttcacgctggacaaaaagtaaaagtttgtgttctctgagaaatgaggttactataaatggctatcgattttttatatccgcagtacgaggtcgtccgcaaccccgcgcgctgcattgcctgccgtgcctgtgaacgacagtgctccaacgaagtacatgcttacgacgatgagctgaaaatgatgatctccgacgaaagccgctgtgtgaactgccaccgctgcgtttccatctgtcccacgcgcgctttgaagatcgtcaagaccgaccacacctttaaggaaaatgccaactggtccggcgagaccatcatggaggtctaccgtcaggcgagcagcggcggcgtgctgctgtcttccatgggtaacccgaagcccctgccggtctactgggataaaatcctcatcaacgcgtcgcaggtcacgaacccgtccatcgacccgctccgtgagccgatggaaacgaagacgtttttgggtcagaagccgtctaaaatcgagcgcgacgagaacggtaagattaagacgaatatcaccccgcagcttgagctttccgtgccgatcatgttctctgccatgtcctacggctccatcagctacaatgcgcacgaaagccttgcccgcgccgcagaagcgcttggcatctactacaacaccggcgagggcggtttgcatcaggatttctacaagtacggcgcaaataccatcgtgcaggtcgcgtccggccgcttcggcgtgcataaggattacctcagcgccggcgccgccatcgagatcaaaatggggcagggcgcaaagccgggcatcggcggccatctgccgggtgcaaaaattgtcggcgacgtttcccgcacgcgtatgatcccggagggctcggacgctatttcgcccgcaccgcaccacgatatttactccattgaagacctgcgtcagctcgttttctccttaaaagaagcctcaaactacaaaaagcccgtcatcgtcaagattgcggcggtgcacaacgttgcagccattgcgtccggcattgcacgcagcggcgcggacatcatcgccatcgacggtttccgcggcggcacgggcgcggcgcctacgcgcatccgcgataacgtcggcatcccgattgagcttgctctggcggcggtcgatcagcgcctgcgcgatgaaggcatccgcaacaaggtttcgctcgtcgtcggcggctccattcgctccagcgccgatgttgtcaaggccatcgcgctcggtgcagatgcgtgctacatcggcacggcggcacttttggcgctcggctgccatctgtgcagaagctgccagaccggcaagtgcaactggggcattgcaacccagcgtcccgaccttgtgaagcgccttaacccggacatcggctataagcgccttgtgaatcttgtcaccgcgtgggagcacgagattaaggaaatgatgggcggcatgggcatcaattccatcgaggcgctgcgcggcaaccgccttatgctgcgcggcgtgggtctgaacgaaaaagagcttcagattctcggcatcaagcacgcgggcgaataagcagaaaagggagcgtaaccatgaaaagagtatatgttgatgaaaaatggtgcctcggctgccatctttgcgaatattactgcgcctttgcaaactccggaaaatccagcatgatcaaggcgctgaaggacagaaccattcacccccgcatccgcattgagggggacaatcaggtcagctttgcggtttcctgccgccactgcacagacccgctgtgcgtgaaaagctgcattgcgggcgcactttccaaaaaggacggcgtggtctgtatcgaccagaataagtgcgtcggctgccacacctgcgtgctggtatgtccctacggcgcgctgatgccctcggaatccggcgtcatgcagaagtgcgagctgtgcatcgaaaacgccggcggcaagcccgcctgtgtgcagggctgtccgaacaaagccatcatctttgaggaaagggactgagcaccatggcaaaatatgtaatcatcggcaactccactgcggccatcggctgtgtggaaggcatccgcagtaaagataaagacggagagatcgtactgattgcttccgaaaaccaccatacctacgcgcgcccgctcatttcctatttattgcagggcaaaacggatgaggagcgcatgaaataccgcccggacagcttttacgaagaaaatcacgtcaccgcaaagctcggtgagaccgtcacaaagctcgactcggaaaagaaaaccgtaacgttaaagagcggggaagagatatcctatgaaaagctccttgtcgcaacaggctccacgccgttcgtaccgcccatggaggggcttgataccgttcccgaaaagttcacgttcatgtcgctcgatgacgcacacgcgcttgaaagcgtccttacaaaagacagccgtgttttgattatcggcgcgggcctcatcggtttaaagtgcgcagagggcatcaaggagcgcgtgaaatccatcacggtcgtcgaccttgccgaccgcgtgctgccgagcatcctcgatgagaccggctccgctatcgtcaaggattttcttgaaaagcagggcatcgagtttcacctcggcgataccgccgcaaagtttgcgggcacgaccgccacactcaaaagcggtcttacggtcgattttgacgtgctcgtcattgcggtcggtgtgcgcccgaatacttcgctcgtcaaagatgcaggcggcgaggtgcgccgcggcattgcagcagatgataccggcaaaacaacactgcccgatgtctacgccgcaggcgactgcgcggagagcttcgatatttccgccggcgtcaaccgtgtgctggcgctgttgccgaacgcctatatgcagggcaataccgccggtatcaacatggcgggcggcaaagcgagctttgaccgggcgatcccgatgaatgccatcggcttcatggggctgcacatcatcaccgcaggcacgtatgacggcgagacctacgtccgccgtgacggcgaaaactacaagatccttttctataaagatgatgttttaaagggctatatcctgattggcgacgtggcgcgtgccggtatctacacggcgcttatccgtaatcgcacgccgttaagctcaatcgattttaagctgatctgcgaaaagccgcagctcatggcattcacggcccgtacgcgccgcgacctgctctcaaagcagcagtaagggggaaaaacatggaacagaaaacatatgcactcggccagcgctatatcggcgcagggcaaagtgagggtacgattatattgaacgaagtgccgggcaacgcgctcggcgcgtatctggacggcgcaaatattattgtaaattgcagcgcacaggacgcgactggcgacacgatgaacgcgggcgagatcaccattcacggcagcacgggcgacgcggcagggtacgccatgcgcggcggtgccatctacgtgcagggcgatgccggttaccgcgcaggtatccacatgaaagagtataaagagaaagtacccgtgctcgtcatcggcggcagaacaggcagcttccttggcgaatatcaggcgggcggcatcatcgtcgtgctcggcatcggcagtgaagatcgccagccggtcggcaatttctgcggcacgggcatgcacggcggacgcatttatctgcgcaccgcgcacctgccgaaggatttgccggagcaggtcgtggcgcataaggcgaccgaagaagacatgcagattgcggcgccgctcattcaaaactacgcggaaaagttcggtgcagatgccgaaagtcttctgcgcgacgaatactacgtgctgcgcccgaacacgcagaatccgtataagcagctctatgtgacgaactgattttgcccctgtaattttctgtaaattaaggtttcttttcttgcataaatcgacggtgtattttggcgataaacattgtgcgttctgtcttattgcaaaatacaccgatcttgtgttataatattcaaaagcggtcagcatacgctgtattttggcagaatatctcaaaatgcggcagaaaagaagaacaggtacagcgtgaaagacggcaacaccggatttcacgcgtatttgtatgtttgaaacgcgcttttaaaaaagaaaggaagggttcggcatgcagtatacggagtccgaggttacagagtttatcacagataacgacgttaagttcatcaaaatggcgttctgcgatattttcggcagacagaagatcatcgccattcagccgagccttttggcttctgcgttcgagggcggcattcccattgatgcttcgcgcatcacgggttttgaaaaagaggcggacagcgagctctttttggtgccggatacctccaccatgtcgcttctgccgtggcggcccgcacacgggcgcgtcgtgcgctttttctgcgacattcgccgttcggacggcaccggcttcgacatcgactgccgcggcatcctgaaaaaagcggttgacattgcaaaacttcatggtataatatttgaatttggggcaagaaatgaattctaccttttcaagaacgatgaaaacggcaatgcaacggctatcccctttgacgacgcgggctttatggatgccgcgccggaggataagggcgaggacgtacgccgcgagatctgcctgacactcgaggatatgggtgtcacaccggaaagctcgcaccacagcggcggcccggggcagaacatcatcgattttcagcacagctctgccattcagtccgcagacgatgttattacgtataagtctgttgtgaagaccatggcgtcgagaaacggccttacggcgtcgtttgcgccgaaccccattccgggtaaggacggcaacggcttccacatcacgctaacgccgcgcatgcagatgggcgactgttccgagtatttccttgcaggtattctggagcacgccgcagaaattaccgccattttgaaccccacggcggattcctataaacgcctcggtgcgttcggtgcgccggagttcatctcttggtcggagaagagccgccggtgctttgcgtataaaaaggaaggcagcagcacaatagaggtgcgctcacccgattccactgcgaatccgtaccttgcgtacgctgcgctcatttatgcggggcttgacggctacctcaaaaagacgaagctgccaaagcccgaccttgcgcgcgagacctgcggcaagctgccgaagtctgccgaagaagcgctgcaaattttcgcaaagagcagctttgtccgcaacgtgttcccggagtatttcgtaaagacgtatatccgcacgttcggcaacgggcccgcagatgtgtaaaacaagggggcacagggcatgaatgcgatcattcagcacagcgtcctcatcgtgtccggcacgcaaaaaggtgcggcgtatatcacagagctgctttccccgcgcgagtttgcgcccatgacaacggcgctcagcggcggagacgcccggcggttgcttttgcggcgcagctacgaccttgtggttatcaacacaccgctcccggatgaattcgggcacgagctggcagagtatatcacagaaaaattcgtttccggtgtcatggtcattgcaaaagcggagcttttcgatcaggtgaacgacaaaatggagccgtttggcatattgacggtgcaaaagccgctttcgcgcccgctgttttatcaggcgcttcacctgctcatcgccacgcagaaccgctggcagcgttttgaccgggaaaatcagaagctcagaaccaaaatggaagaagtgcgcattgtggcgcgtgcaaagtgtatccttgtggaatacctgcgcatgagcgagcagcaggcgcaccgctatattgaaaaacaggcgatggatatgcgcacatcgaaaaaggatgttgcggaaaatatcctgaaaacctatacgtaaatgaatgcgtacagggctgcaccgcagctttgacatagattgcatacagcagaaaagagtaattatttcagggaaagaggaacgtacgttatgggcaacaaagcatatttggtactcgaaaacggaaaggtcttctgcggcgaatccttcggcgcggcgggcgaagtaacggctgaggtcgttttcacgactggcatgacaggttatctcgaaacgctcaccgataagagctatttcgggcagattgtcgtccagacatttccgctcatcggcaattacggcgtgatcccctccgattttgagggaaagatcatcggtccctgtggttatatcgtaaaagaatggtgtcagtcgccctccaatttccgctcggagggtgatcttgacaccttttttaaagaaagaggcgtcatcggcctttgcggcattgatacacgtgccctcacaaaggtcatccgcgaaagcggcgtcatgaacggtatgatcacaacagagcttacgcatgtcgatatggataagattcacagctaccgcgtgacaaacgcggtggaaagcacctccgtcaccgagatgacgcgccgtgagaacccggagaaaacatgcaccgtggcgctcatggattacggctacaaggagaacatccgccgcgagctcgaaaagcgcggggcagaggtcattgtatgcccgtacaacacgacggcagacgagttaaaggctctcaacattgacggcgtgatgctttcaaacggccccggcgacccggcggataacatcgaggtcattgaaaacctcaagaagattatgaacatgggcaaaccgctcttcggcatctgcctcggtcaccagctgctggcgcttgcaaacggctttaagaccgaaaagctcaagtacggccaccgcggcacaaaccagccggtgcaaaaccttgagaccggccgcgtctacatctccagccagaaccatggctacgcggttgtgtcctccacaatcgaccccgagatcgccgacgaatatttcaacaacgtaaacgacagaacgtgcgagggcgtgcgctataaaaaaatccccgctttttccgtgcagttccacccggaagcctgcggcggcccacgcgataccgcgttcctctttgataaattctttgagatgatgggaaaataaacagtacccaaagcagtatagaaaggattgtttacagctatgccattgaataaagacattaaaaaggttctcgtcatcggctccggcccgatcgtcatcggtcaggcggcggaatttgactacgccggcactcaggcgtgccgtgctctgaaagcggacggcatcgagatcgtgcttgtcaactccaacccggcgaccatcatgacggataacgccatggcggaccacatttacatcgagccgcttacgctgcccaccatcaagcgcatcatcgaaaaagaaaagccggacagcatcctctccggcttcggcggccagaccggcctcacgctttccatgcagcttgcaaaggaaggctttttgaaggaacacaacgtacgcctgctcggcgcttccccggagaccatcgataaggcggaagaccgtcagatgttcaaggatacgatggaaagcatcggtcagccgtgcatcccgtccaaggtcgtcaccacggtagaggatgcactggagtttgcggaagagatcacgtaccccgttatcatccgcccggcgttcacgctcggcggcaccggcggcggtatcgtcgataaccgcgaagagctcatggaggttgcggcaaacggccttgcgctttcgccgatcacccagatcctcgttgaaaagagcattgcgggctggaaggagattgagttcgaggttattcgcgacagcaagggcaacgtcatcacggtctgctccatggaaaacttcgacccggtcggcgtccacaccggcgacagcatcgtcatcgccccggcggtcacgctttccgataaagaatatcagatgctccgcactacggccatcaacatcatcgacgcgctcggcgtagagggcggctgcaactgccagttcgcgctgcacccgacgtcctttgagtacgccgtcattgaggtcaacccgcgtgtgtcccgttcctccgcactggcatctaaggcaaccggctatccgattgcaaaggtcgcgacgaagattgccatcggctatacactcgatgagatcgtcaacgccgtcaccggcaagacctacgcagcatttgagcccgcgctcgactatgtggcggtcaagttcccgaagtggccgttcgataaattcgtctacgcaaagcgcaacctcggcacgcagatgaaggcgaccggcgaggtcatgtccatcgccgatacgtttgaaatggccctcatgaaggctgtgcgcggtgcagaaatctcgctcgatacgctcaacatgccgaagttcgcaaactacgaggacagtgccctgtggcagattttaaaagacgcgacggacgagcgcctgttcgccatctacgagctcatgaagcgcggcgtcaccaccaaagagatccacgacttcacgatgatcgacatgtggttcctcgaaaagctcaataacctgctcgcgtatgagcgcgagattaaggatcagccgctcacgcacgcacagtatacgcgcggcaagaaactcggctacacggacgaagccctcacgcgtatttgcggcacaaagccgaccttccgtcacgaagcgaccttcaaaatggtcgatacctgtgcaggcgagttcgctgcgaccacaccgtatttctacggcacctacgatacgccggagcagggcggtgaaaacgaagcgatggagttcatcggcaaaagcggcaaggagaccgtcatggttttcggttccggcccgatccgtatcggtcagggtatcgagttcgactatgccagcgtccattgcgtggagtctctccagcgcctcggctatgaagtcgtcatcgtcaacaacaacccggaaaccgtttccacagacttcgacactgcagaccgactctactttgagccgctgtgcgccgaagacgttatgaatatcatcaacatcgaaaagccgaagggcgttgtcgtcgcgttcggcggccagacggccatcaagcttacaaagacgcttgcgaaaaacaacgtgccgatcatcggcacaagcgccgacagcatcgatgccgcagaggacagagagcgctttgaagaactgctcgaacgctgcaacatcaagcgcccgaagggtcacaccgttatgacgacggaggaagccctcgcagccgcacacgacctcggctatccggtgctcatgcgtccgtcctacgtgctcggcggtcagaacatgatcattgcatacggcgatgaagacatcaacgaatacatggcgattatcctgcgccagaagcaggataacccggtgctcatcgataagtacctcagtggcaccgagattgaagtcgacgccatctgcgacggcgagaacatcctcatcccgggcatcatggagcacgtagagcgcaccggtatccactccggcgacagcatcgcggtctacccggcaaaggacatcgacgacgagctcagcgcgaagattgtcaagacgaccgaaatgctctgcacggagctcaaggccatcggcctcatcaacctgcagtacatcatcatgaaccgcgaaatctacgtcatcgaggtcaacccgcgtgcatcgagaacggttccgtacctcagcaaggtcacgggcgtgcctatgtgcgacctcgctacaaaggtcagcctcggcatgaagctcaccgacctcggctacggcacgggcctctatccgacttcgccgtatacggccgtcaaggtgccggtcttctccttcgagaagcttacggatgtcgatacccagcttggcccggaaatgaaatccactggcgaagtgctcggcatcggcaacaaccttgaggaggcgctctataagggcctcatcgcctccggcagcaagatgaacaaaaagggcggcgtgttcatcaccgtccgcgacggcgataagaaagagatcggcgagatcgcgaagaaattcgacaaaatgggcttcccgctttacgccacgacgggcaccgcaagcgtgcttgcaaagctcggcctcaccgtgaagattgtcgataagattcacgaaagcccggtcaacaccattacgctgcttgaaagcggtaagctggcgtacatcatctccacctccgcaaagggcagaaaccccgcacgcgacagcgttaagatccgcagaaaagcggcgctgctcggcatcccgtgcctcacggccatcgataccgcaaacgccctcgcggacagcctgatgagccgctacaccccgtacaacacggagattgtggacatcaacaacctcaaaaaagaaaaggtcaagctgccgttcaccaagatgtcagcgtgcagcaacgactacatttatatcaactgcttcgaaaacgaagtttcctctccggagttcctctccatctacctgtccgaccgccacaacggcgtcggcggcgacggtgtcatcctcatctgcccgtccgatgtggcagacgctcagatgcgtatgttcaaccgcgacggcagcgagggtctcatgtgcggcaacggcatccgctgcgtcgcaaagtacctcttcgacaacggcatcgtgaaaaagcctgtcatcaatatcgagacaaagagcggcatcaagtcttgcagcatcatgacgatgaacggcaaggcgtacaagattacggtcgatatgggcgcggcagcgcttcgcccggagcaggtgcccgtaaagctcgaaggcgacatggtcgtcaacaagcctgtcatcatcgacggtcacgagtattacatcacctgcgcatccatgggcaacccgcactgtgcggtgttcgcaccgtccattgataagctggatctcaatgccatgggcccgaagttcgagtataacccgctcttcccggagcgcgtcaacgtcgagttcatcgaggtcgtggacgagcgcacccttaaggtacgcgtttgggagcgcggcagcggcgaaacgatggcctgcggtacaggtgcttgcgcggctgttgtcgcggcaacgctcaacggcaagtgcgaaaaaggcgaggacatccgcgtcatcttaaagggcggcgacctcaccgtgcgctacaccgatgagaaagtgctcatgaccggcggcgcagagaaggtcttcgacggtgtcgtagaagtctaattgatgttaaatagttcggcgttccgcatttttgcggagcgccgaaaaacattttaagaataaaatcagaatttttttctaaaaatttgaagaagataaaaggtaaaaattcaagagaaagcggtgaaattccatgaacaagtacttgaaaaaagcggaaaacagctcgggcatcgaccactatgtgcgcgtgccgggcaccggggcaaagcagaagatcacgtttaccaaaatgcacggctgtgcaaatgattacgtgtatattgactgcttccaaaatgatattcaaaactacgccgagctcgcaatctatctttccgaccgccacaccggcatcggcggcgacggcgtcatctacatttgtccgtccgatgtagccgacgcgagaatgcgcatgtataacctcgacggcagtgagggcatgatgtgcggcaacggcatccgctgcgttgcaaagtatgtctacgacagcggcatcgcgaagaaagacgttttgcatatcgagacaaaaagcggcatcaaaatctgccgcgtgcatgtcgaaaacggcgaagttaccactgtcacggtcgatatgggcaaagcggagctcgtgcccgcgaagatcccggtcgatttcccgggtgatactgccgtcaaagagaagatcaccgtccttgacaaagaatacgaagtcacctgcgtttccatgggcaacccgcactgcgtcattttcggcaaagatcccgatacgatcgacctcgagaagatcggcccgcattttgagcactttgagaagttcccggagcgcatcaatacggagttcatcgaggtgctggataaccacaccttaaaaatgcgcgtgtgggagcgcggcagcggtgaaaccatggcgtgcggcaccggcgcgtgtgcgtctgccgtcgcggcgtgtctcaacggctactgcaaaaagggcgaagatattaccgtcaagctgcgcggcggcgaccttgtcatcaattataccgatgacggcgtgcagatgaccggcagcgccgacacggtttttaccggcatcgtagaaatttaactgtaaaaaagccgaaaacggctttgataaaatgaaatagggtattggagaaataataggtttctcagtcaaagaaaaatataaaagtttcactgtaaaaaagaaaggggtaagttctatgacaaagtacattttcgtaaccggcggcgtggtttccggcctcggtaagggcatcacggcggcatcgctcggccgtcttttaaaagcgagagggttaaaggtcgccgcacagaagcttgacccgtacatcaacgttgacccgggcaccatgagcccgtaccagcacggcgaagtttacgtgaccgaggacggcgcagagaccgaccttgacctcggccactacgagcgcttcatcgacgaagacctgaataaattctccaacctcacgaccggcaaggtctactggaacgtcctcaataaggaacgccgcggcgagtaccttggcgagaccattcaggtcattccgcacatcacggacgagatcaagagcttcatttacagcgtcggccacaagacgaatgcagacgtcgtcatcaccgagatcggcggcacggcaggcgatatcgaaagccagccgtttctcgaagccattcgtcaggtttcgctcgaggtcggtaaggaaaactcccttttcattcatgtcacgcttgtgccgtacctcaaaagctccggcgagcataagtcgaaaccgacccagcactctgtaaaagaaatgcagggtatgggcatctccccggacatcattgtcctgcgctgcgatgagccgatcgatccgagcattttccacaagattgccctgttctgcaacgtaaagccggactgtgttattgaaaacatgacgatcccggtgctgtacgaagcgccgattatgctggagaaaaacaatttctccagcgttgtctgccgcgagctgaacctcaagacaaaagagccggatatggccgagtggagccgcatggtagagaagatccgcagccgcaaaaagaccgtcaccattggccttgtcggcaaatatatcaaactgcatgacgcatacctttccgtcgtcgaagcactcaaccatgccggctatgagcacggcacaaaggtcgagatcaattggatcgattccgagctcatcacgcaggaaaacgctgccgaaatgctcaagggctgtgatggcatccttgtgccgggcggcttcggcaaccgcggtatcgagggtatgatttatgccgcacagtacgcaagagagagcaacgtcccgtacctcggcatttgcctcggtatgcagattgccgtcatcgagtatgcccgccacgtgtgcggcatcgcagatgcaaactccggcgaattcgacgagtacggcctcaataaggttatcgatttcatgccggaccagtccagcaccatcaatatgggcggcacactgcgcctcggcagctacccgtgcgagatcgcggagggcacgcaaatggcgcgctgctatggcgtttcccatattgatgaacgccaccgccaccgctatgagttcaataacgattacagagagacactcacaaaagcaggcatggtcatcagcggcacctcgccggacggcaggatcgtcgagaccgtggaagtgccgcagaacgacttctgcatcggcgtgcagttccacccggaatttaagtcccgcccgaataaggcgcatccgttattcctcggctttgtcggcgcatcactcaataagagggaaaagaacgcataagagacggtaatgaaaataaaaaaggtccaagtataaaaagaagggaagaaaccggcatgaaactcaaccaaaactacgcaaaccttcaggaaagctatttgtttctgaccatcgcaaagaaagtcgccgcctatacggaggcgcatccggataaccacatcatccgcatgggcatcggcgatgttacccagccgctcgttccggccgtcatcgaagccatgcacaaagcaacggatgaaatggcgcacaaggagacattccacggctattcgccggatcagggctatgatttcctgcgtgaagccattcagggctattacgcaaagcgcggcgtggcattaaagctcagcgaaattttcgtcggcgacggcgcaaagagcgacgtcggcaatatcgtcgatatcttcgcagacgataacaccgtcctcatcccggacccggtctatcccgtgtatgtcgatacgaacgtcatgtccggcagaaaggtgatctacctcgacgcaaacgagcagaacggcttcctcggtatgccggatgaaaacgtcaaggccgacattatctatctctgctcgccgaataaccccaccggcgccgtgtataacagagcacagctcaaagcgtgggtcgattacgcgctcaaaaacaacgcggtcatcctgtttgatgccgcatatgagtcgttcatcacgcatgacgatctcccgcacagcattttcgagattgagggcgcgaaaaagtgcgccatcgagttctgctcgttctcgaagaccgcaggcttcaccggtgtgcgctgcggctataccgttatctgcgatgagcttgtttcggacggcaccaaggtcaatacgctgtgggcgcgccgtcaggccacaaagttcaacggcgtcaactacatcacccagcgcgccgccgaggccgtcttcacggacgaaggccagcagcaggtgaaggacgtcatcaactactaccgtgcgaacgccaaggtcatggtcgatgcgttcaaggagatgggcgtgtggttcaccggcggcgaaaactccccgtacatctggcataaggtgccggacggcatgacctcctgggagttcttcgattatctcttgaacgaagccgaggtcgtcggcacgccgggcagcggcttcggcaaaaacggcgaaggcttcttccgccttaccgcgttcggtacgctggaaaagacacaggaagccatggagcgcctcaaaaagctgcttaaaaagtaattcaaacgaaggcaaaggggactgtgcaaaacctgcgcagtctcttttttgctcttgacttgtgcagacaagttgctataatgaaactgagcttatttcctacggaggatacactatgcattacaaaaaagatcgcgtcgctttaaagccgccgcttggctggaacagctgggattgctacggccccgccgtcaatgaagtacagcttttgggcaatgcgcgttatatggcagagcacttaaaagcgcacggttggcagtatgtcgtgtgcgacattcagtggtacgagcagccggaggccgggcagcgccactgggagtataaccgtttcgcagagctgtgcatggacggattcggccgcctcatcccggcggaaaaccgtttcccttccgctgcaaacggcgcgggctttaagcccatcgccgaccagattcacgcactcggtctgaaattcggcatccacatcatgcgcggcgtaccgcgtctcgccgtgcatcgcgccctgcctgtaaaggacacgaacgtcacttgctgcgacatcgctcacgcaaactccatctgcgcgtggaacaccgatatgtacggcgttgacgctgatcgtgacggcgcacaagcgtactacgacgctatctttgagctctacgcttcatggggcgtcgattacgtcaaggtcgatgacatctgcaacgtgaagatcactccgctcgagccgtattccgcgcgccgcgagatcgagatgatccgccgcgccattgaccgctgcgggcgcgatatggtgctcagcctttcgcccggtccggctgtactggaagaagcatggcatcttgcgaaaaacgcgaacatgtggcgcatcacggacgatttctgggataattgggactccctcaaagaaatgttctggcggtgcgagcgctggcaggcgcacgtaaagcccggtcagttcccggactgcgatatgctgccgctcgggcatatcaccatcgcggcggacggcatagggcacaatacgaacctgacacacgccgagcagatcaccatgatgacgctgtggggcattttccgctcgccgctcatcatgggcggcgaaatgcgcgataatgacgcgttcacgctgagcctgctcgcaaatgacgagcttttaaacctcaaccaaaacggcaccacgcctttgcagcttttccgcgacgaaacaaaagccgcgtggctcaatttcgtaggcagcacgccgtatatcgcacttttcaacctcacggaaaaccgcgccgttgtcagcgccgagctgtcggaattcaccgataaaacgcacgcagaggagatctggagtggggagaagaccgcattcacaaaaacgctttccgctaaaatagagccgcacggcgcaaagctttataaactcatttgaccggatacaggaggagaacatcatgctggaaaaactgaaagaagaagtctacaaggcaaatatgctgctgccgaaatacaagctcatcacgttcacgtggggtaacgtcagcggcatcgaccgcgaaagcggtatcatggccattaagccgagcggcgtggagtacgaccttctgcgccccgaggacatggtgctcgtcgatgtgaacacaggcaaaaaggtggagggcgaccttaatccatcgtccgatacgcccacacatgttgagctctacaaggcattcccgaacatcggcggcgttgtccacacgcatagccgctgggcgaccgtgttcagccagtccggccgcggcatcccggcgctcggcaccacacacggcgattatttctacggcgaaattccctgcacgcgcaaaatgacgcctgaggagatcggcggcgcttatgaaaaggagaccggcaccgtcatcatcgagacgtttaaggataagtccccggacgacatccccgccgtgctcgtccacagccatggcccgttcacatggggtacagaccccatgaacgccgtgcataacgccgtcgtcctcgaggagctcgcgttcatggcatggcacaacctcgtgcttgaccccacaatcccgcccatgcagcaggagcttcttgataagcactacctgcgcaagcacggcgcaaacgcgtattatgggcaggggaaataaagagcgcaaggcttttgctgcgctcacgctttcgctttgcctgcttctttccggctgtgcgcagccgccaaagccggtgacggaagccgaaacgcagacgattctctataccgccgcggggcatgaaacagggcaattttcgtcctcgtgcggcattacgcctgtcggtgacatgctcctgtttgaccgccgtgcgcgaaatgaaaagggcgacgtgacgcgtgtttcgtactattgcaaggatttaaaaaacggtgaagaaacgctgcttggcacgttgaaccgcatgtactatgagccgaccgacagcgcagaagcggttgtcggtagccacgtttaccgcatgattccgcttggcaactggtggaatatgcccgataaagacgccgaactcgcgctctatgatttcgatttgaatgtgaaaaccatgcaacgaatcggcaccgaaaactactgcgtaaccgatacaacgactggtattggcttgacgctctgcgcctacggagagcattttctcctccaaaaaggcgggcaaatttgcttctcgaccccaaaactgccgaggtgaacaccgtttacaatgcgcaaaatggcgcatgtaaagtgctcggtcttgctgcagacgcaaacgcgcacgggttttctgtgctcatgcagtccgcggaaaacccatcgcagttgtcggttcatacctatgaggaaagcggtacgcttctaaatattgccgatctgtctgcgtgcttgcaaaatcctgataccgcaaactggaagaacacgaacatcagcttcgctgtgcagggcgactacctgtatttttacggatacgatttcggtgaagacgcaggcgaaaaaccgatttacagcgtactcgcgaaaattgacggcgagacctgcactgaagtcgccgatttcgagcaaagcacagccaattttgtgccgagctataccgcaaaagcagacggctttctgtttgcgttcggcgacattgcctaccgcttttccacccaaaacggctgggaaaagggtgcagtcccgctacaaaacgaagaccttacactgcgcgaatggtactttgacggcgaacactattgggtctcggctgtaaacaaagacggcagtgactgcgcaggagacggcggctatgcacaaactacacgctattgccgcgtggcaaacgcagacctaaactggtcgccgtgcgccgcaccgaacgaaccataaagcaagacccgccgggaaatatacacctcggcgggtcaaattattcgttattcttttatgaacgtgtcgagcagggcgagacccgaagaggatttaaacagtcgccgcacggcttttgcgtgggcagaaggatcatcttcttccgtgcagcccgcaatgaggtcggcttcaacgagaagctgcagatccttgccatcgatcttgtcgtagcagtgatgcagaacgatcatcttggtgatgcgtggcagatcttcttccgcgtagccacaagccgtcagaaattttcgcgccaacgcaggtgcttccttgcgctgattcgcggggcagccgtcatcgtacttttccttgcaaaatttgatcgcgatatcgtgcaaaatcgccgccgcgcgcagattttcctgctcgtgggtgggaagattttccaactcacccagcattttcgcaagaccgtatacctttaaaatgtgctgtgtgcggcgcaggtgcccgttctcatacaggagcgcgtcatataaaagcttcgcttcgttcggcatgcaatcccctccgtttcaaggtcatcataccatggctttgacatttgtgcaagagtccgctatactaaattaaaacgcgacagatcacggagaacctacatgctcacctattctttctcaaaaatcggctccgaaagcctttatatgtacctgtataagtgcatccgtgaggacattctgacgggcaagatcacgcccggcacaaaattgccctctaagcgcagctttgcggaaaacctcggcgtcagcgtcatcacagtcgaaaacgcctatgcgcagcttgtctcggaggggtacgtctacgccttgccgaaaaaaggcttcttcgccgccaatctggaaaaaagcaccgcgccgcagaaaaaagagagtccccggacacaaatgcccgtaccgccgaaatattttgcggatttttccagcagccgcaccgacccgcagaattttccgtttgccacatgggcgaagctcatgcgcgagatcatctcggaaaaaagcgccgagcttatggtaaacgccccatgcggcggcgtattcgagctaaggtgcgccatcgccgagcaccttagggagtttcgcggcatcgatgccgacccgaactgcatcgtcgtcggcgccggaacggagtacctctacgggcttctcatccaacttttggggttcgataaggtctacgcgctcgaagatcccggctaccgcaaaattgcgcaggtgtacgagagctacggtgtgcagtaccgtttcacgccgatggataaagaggggatagaccccaaagcgctcgaaaaaagcggcgcggatattctgcacatttcgccgtcgcaccacttcccgacgggcatcgtcacgcccatcgcacggcgttacacgcttctcgattgggctgcgcagagcgaaaaccgttacatcatcgaggacgattacgattccgagttccgccttaccggcaagcctatcccggcgctgcaaagcatcgattccgccgaccgcgtcatttacatgaatacgttttcaaaaagccttgccagcaccatccgcatcagctacatggtactgcccacagcgctcgccgaagcattttacaaaaatcttgggttctacgcgtgcacggtctcgaacctagagcagtacacgctcgcaaaattcatttccgagggctattttgaaaagcacatcaaccgcatgcgcatccgttataagcaaaaaaaggacctcatcttaaaagagatgaagcgctgcggtttgttaaagcttgcaaaaatcgatgccgaagacgccggcctgcattttcttctgcgtgtctgcggacctgtgcccgccgaaaagatcacccgccgcgcggcggaaaacggcgtgcgcgtcaccggactttcggcgtattaccatacagcgcccgtaaacccgcagaccgcattcgttatcagctactccgaggttcccgacgcccgcattcccgaagccgtcaaccgcttagctaaagccgttacggctgcggtgatgggggagagatgataaaaccccgccgcccgcaaagataagattttgtctttatggcggtggggttagtgacatatttcgctttgcagaatatgaaatgagtgctgccgtatttgtgaagttttccgcgtatacagaaagtgaaaggaacttcgctcttaacgcgcgcagcacagctcactgcgaagaaatttcacgataaccgaaggttgttattttactcgccgtaaggcgaatttcgttgaaaaaagaccattgtcatttgacaatggtctttttggtgcaggtaacaggacttgaacctgcatgaacttgcattcatatggacctgaaccatacgcgtctgccaattccgccatacctgcatattctttttgccgtctcgtttgacggctcaattattatagcatgatgcagctgaattgtcaacagctattttttgacttttaagaacttttttcgttttcggtcacgcggtagcacagcgtcatcatgctgtcgttcagatgcacgttttccacgatcgtgtccggatagcgcagggcaatatcgtagtggctgaaattccagtagctcttgatgccgatgtcataaagcagctccacgaccgatttcacggcactgtccggcacgcacaaaatcgccatcaagggcgcgttttccgagcagaagcggcggatgcccgcagcggggagtacgcgtaggtcggcaatctgctggcccacgacctgttcgctgttgtcaaaaataccgatgagatcaaaccccgcgaaattataagaaatgtgcgtcgcaatggccttgcccaaattgcctgcaccgattaaaatgcacttgtgtgcacggtccacacccaaaatagagccaatctcctcgcaaagttggtgcacgccgtagccgtagccctgctggccgtagccgccgaagcagttgaaatcctggcgcacctgcgaagccgtgaaacccattttttcggaaagctccttagaggaaatacgcgtcactccgcgcttgtccaagtgccgcaaaaagcggtagtagcgcggcagacgccgaatgaccggcatggaaatatacggtttcttctgcatatcatcacctcgtttgacaaaattttagcacatcataaagacctgtgcaagtgttttttataaataagaaaagaaaaacgggcggccagaccctaaaaaggagggtggccgcccacgcttttcaaatccatgtcgggttacagaagttgctccaaacgatcgcggatcgcgaggaggaagccctcggtgtccactttctttgcattcggcagggtagacatcgccgcaaggtcgccggtcatgatgccgtcctcttcaatcgtctgcaaagttgccttttcaagcttgtccgcaaaggcgctcagctccggcaggtcgtccagcgcgccgcgcttacgcagcgcgcccgtccacgcaaacaatgttgcgacggagtttgtggaggttgtttcgcccttcaaatatttgtagtagtggcgctgtaccgtgccgtgcgcggcttcatactcgtaaacgccgtccggggagacgagcacggaggtcatcatggcaagactgccgtacgccgtcgcgatcatgtcgctcatcacgtcgccgtcgtagtttttgcaggcccaaatgtagccgccttcactgcgaatcacgcgcgcaatggcgtcgtcgatcagcgtgtagaagtattcaatgccgactttttcaaacttctctttatattccgcgtcgtaaatttcctggaaaatatccttaaagcggtggtcgtaggtcttcgaaatcgtgtcttttgccgcaaaccacaggtcctgcttcatgctcagcgcgtaattaaagcaggagcgtgcaaagctctcaatgctcttatcaatattatgtaaaccttgaatcacacccggcgttttgaattcgtggatggtcacgcgctcctcagtgccgtccgcttttgtcacaacaagctcagcctttgcattttccggcacgcgcatctcgacgttcttatacagatcgccgtacgcgtgacgcgcaatggtaatcggctttgtccacgtcggaatgtacggcgtgatgcccttcagcaaaatcggcgtgcggaacaccgtgccgtccaaaatggcacggatggtaccgttcggagatttccacatctctgtgaggttgtactccttcacacgcgcggcgtttggcgtaatggtcgcacactttacagccacaccgtattttttcgttgcctcggcggaatcaatcgtaacctgatctttcgtcgcctcgcggtgctccagaccaaggtcataatactccgttttcaggtcaacatagggggtcagcaaaatatctttgatcattttccagatgatgcgggtcatctcgtcgccgtccatttccacaagcggcgttttcatggggatctttgtaaaatcggacatttcaaagccttacctttctgcggctgtaccgcgaagctctgtgtcacggggggagaatgtgacgctgtttctatcattatcggatatttcgcgagaaaagtcaatcgtaaattgtgaataaactgcatgaaattgcaggaaatacagttaaaccctgcaaaacgtgcatactatgtatttacaggacatcggcggacatgtttgcgctttgcccttgcaggatgcgtaaaagcgtgctatactgatatacgtgaaagtttgtgccgcgtatgattccgcattttctgtgaaaactaagcgcatcttaattcaaaaggagcgctgcggcatgaaaagcacaaagaaacgctcgtctttttccatgcaggaaacggacgaagccgaagaagaaaacgaagacctttccgaccgtcagaagcagatccgcgagggcggcgcggtcgttaccaaaaaccgaaagcacaccatccagtgcctcaccgtcatcggacagattgaagggcattacgtcgcaccatcgcagaacaaaacgacgaagtacgagcacgtgatcccgcagatcgtctccgtggaggaggacccgaacatcgacggtctgctcatgattttaaacacggtcggcggcgacgtggaggccggtcttgccattgcagagcttgtcgccggcatgcgcaaacccacggtgtcactcgttctcggcggcggacattccatcggcgtgccgcttgcagtggcggcaaagcactcgttcatcgcgccctcggcatccatgaccattcacccggtgcgcatgagcggcctaatgcttggcgtgccgcagacgctggagtatttccagcgcatgcaggaccgcattacgaatttcgtcacggcaaattccggcatttcctatgagcgctttatgcagctcgccatgaatacgcaggagctcgtcatggacgtggggacggtgctggacggcgatgaagccgtggcagaggggcttattgatacgctcggcagcctgcacgatgccatggattgcctcgacaaaatgattgccgcagagaagaataagcagcgtgcaaagcccagaaaaggcaagaaatcactctaaaaacggcatttgccgtttacataactttttatttatcgtataattataccgataaaaccgaacaaagccaaattatccgcagaaaaggagattacataatgtctatttttgaagcaatcattcaaggtattgtacagggcgcaacagagtttctgcccgtctcaagcagcggtcacttgtcgcttgcacagcacatcatgggtgtaaaggtagacagcttgctgtttgatattcttttgcacctcggcacgctcatcgccgtatgtgccgtctattataagctcatctggcggctcattaaggcgtttatttcgctcgttgcagacgtattccgcggcaaattcaagtggaaagaaatggatcatgaccgcagacttttgatgatgctcatgatcggccttatcccgctgttccttttgttcctgccggttccgggcacgggcatgaagttaaaagatatttcggagctgtgggcttcggattcgacgatttggatcgagggctttgcgctcctcatgacaagtgccctgctgttcctcggtatccgtgcttccaagggtgcaaaggtacatcactttacgcgtaaggatggtaaagtcggcgagattcgcggccgcacaaagttccacacggcagacgccatttgcgtcggtgtcacgcagtgcgcggcggcggtgttcccgggcctttcccgttccggctccaccatggcggcaggtcttctgcgcggcatcaatcagcaggcagcgctcgattattccttcgtgctcggcatcccgtccattttggcggcagctgtgcttaccattaaagatgcaatcggtcagccggtcgacattggcgtcggtgcgatgattgcaggcgttgttacggcggctgttgtcggcttcctcgccatcaagctgctcaagtggattgtcaccacgaacaaattacaggttttcgcttattatacgctggtgctcggcgttataacgctcatcgtttccgttatcgaagcggtcacgggcacaaatcttttcaccggcatgccgctttgatccggtgatttataatccggaggtttattttggcgggtaaaaaacaaagtacagcaaagggcagtgcttccaaagcaagaagcggtgcgaagtcatcggctgccaaaaacacccggagctcgggttctaagtccaatacaaaatcgcgtgcgtcttccgcaaaagggaagagcacgtcttcaaaacagagcgcgtccagcgtagagcagctgcgccagcgcaaccagacagaagctatcctctggttcggtgcggctattttaacggcgtgctttgtactcattccgggaggcagcgtgtggcttatggtgcacaacgtgctgcgcggcgtgttcggcggctgggctattctgcttgcggtgctgatggggtatatcgccgtcagcaaaacgatggagcagaccaccatgctgcgcggcgggcgcttggcgctcatggtcgtgattgtcgtgctgttttgcacggcggggcatgtgtttggcagctttttcccgaaggaaaagagtttttttaagctggtcggcatcttatatatgcatggcgtagagcagggcggggccggtcttgtcggcggccttgtcggcgagctgctcgtcaagtgcgcggaagtgcttggcgcacgcatcatcacgggcgtgctgctgttcgtctccgtgctcatctttacgggcacgtcgctcgcgagcttttttaaaaaaattgcaaagccggcggtcgtcattcgcgacgtcgcgcggcagcgcaaggaagagcgccgcattctggaagaggagcgcggtaatgcggaggaatcgccgtttgaaacggttttgccgcagcatccggtgcgctctgtcccggaggatggtaaaatggaatcgaaaaacaaaggaaagacgccgcgtgtgtatttggagcagcttttcggtgtgcgccgcacggagccggataacgaccccgtagtgctgcacgattacaccgaaagctctgcacagatcaacgcattgatcgacgaaaatcgccgtgtgccggatttccgcgtgcccggcttagagcgtgaagcacagcctgcgcaaaatgtgcagccgacctatacgccgccggtgcaggcggaagtgcgccccgcgccgcagcccgctgaaacgccggagacccacgtgccggtggaacgcgaaacggtggaagcgccggtgatcatgccgcccgttatgcagacggcaaagccggagcctgcacctgtgcagcagagtgcgtatgcacagcctgcgccacagccggccacaccgacaatccttgtgccggggtcgtccccggtgacgcccgcgcacagcgcggaagctgccgcggacgcgcagaaggcgacggaagaattcatgaaaaagaagttggaagcagaacgcatggagacccagcttgcgcaatctgcaccgaaggaggaagacagctcatatatcttcccaccggttacgatgctcgcttccggcaaaaaagtagatgccgccgtggagaccgaagagctccagacaaacggcaagctgcttgtggaaacactgaaaagcttcggtgtgcagaccaaaattctcgatatttgccgcggcccggctgttacgcgctatgaattgcagcctgccgccggtgtgaaaatcagcaagatcacgaacctcgccgatgaccttgcaatgaaccttgccgcgacgggcgtgcgcattgaggcgccgatcccgggcaaggcggccgtcggcattgaggtgccgaacaaggtgaagaccatcgtacgcatgcgcgagcttgtggaatcgaacagctttgtgacctcaaaaagccacttgaccgtggcgcttggccgcgacattgccggtcaggtaacggtggcagacctcagcaaaatgccgcatatcctcattgccggtacgaccggctccggtaaatccgtgtgcatcaactcgcttatcgtgagcctgctgtataaatccggcccggacgatgtgcgctttttgatgattgacccgaaggtcgtggagctcggcatttataacggcattccacacctattggtgccggtcgtcaccgacccgcgaaaggcagccggtgcgctgaactgggccgttacggaaatgctgaagcgctacaaaatttttgccgaaaacaacgtgcgcgacttaaagggctacaacgccctcgcgcaggcgaacaattatcaggacgaaaacggacagcccatgcacaaaatgccgcagatcgtcatcatcatcgacgagctttccgacctgatgatggccgcgccgaacgaggtggaagacgcgatctgccgcttggcgcagatggcgcgtgccgccggcatgcaccttgtggtcgcaacgcagcgcccgtccgtggacgttgtgacgggcctcatcaaggcgaacatcccgagtcgtatcgcgtttgcggtgtcctctgccattgactcccgcaccattttggacagcggcggtgcggaaaagctgctcggtcagggcgatatgctgttctcgccggtcggcgcacagaagccgctgcgtattcagggctgctttgtcagcgacagcgagatcgaatccgtcgtggatttcgtgaagaattcgagaagcgttatttacgacgactccattgcgcaggagattgagcgcagcgctgtggagggctcaaaatcgagcgacagcggcagcaatgacgatgagggcagcggtgacccgatgatgaacgaagccattaagtgcgttgttgaagcgggccaggcctccacgtcgcttttgcagcgcagactgcgtctcggctacgcccgcgcgggccgtctcatcgatgagatggagcagatgggtattgtgggcccgcacgagggctcgaagccgcgccaagtactcatcacctatgcgcagtggctggaaatgaacatgcaaaagcaggatacccccggtgatgcgtaacacaaagcgcggtgcacgggacggcagaaagcttgtgcgcacaggcgctttggtacttgttttgcttcttttggcgttctgttacacgccgcccggacgggcgatgtggacggagctccgccgcgcatgcggcctgctgccgtttgcacagagcttgcccgatgccgatttgacggtttatgtcatcgacgtgggcaaggcggatgcaatcttaatcgaaacgccggagggcgcagtgctttcggactgcgcgacagcggagcaggcgaaaaccgtgctgcgcgttttaaaacagcgaaacattcaaaagctgcgcgccgtgtggatctcgcacgcggacagcgaccacgtgggcgggctgacgcaaattttgtgggaggtgcccgcagaggaggtggtcacctccatgtacacggagctgaccgggctgccggaagatcaaaccgtgcgaacggtaagcgccggggagacggtctcttacggcgaggcggaatttcgggtgctcgcgccttcagaagatttagagagcacgaatgagaattcgcttgtgtataagctttgctacaagaaattttccgtgctattctgcggtgatattgaggagaaagcggaaagactgctgctggatatgtatggcgacacgctgcgggcggatgttttgaaggtgccgcaccacggcagcgcttcggcgacaagcgatgcattgcttgaagctgtgcagccgcagtatgcggtaatctcctcgggcgaagacagaaatttgctgccgcgaaacgagacgctgaaacggctcgccgaccacggcattgaaattttccgcacggacgaaaacggcggtattgcgattttgacggacagcgctgaaacgaaaatttacacggaaaacgggaaataacccgctgttatataaaaggtattacggaaaggaacagatgatatgaaacaaatcaccatcgaccgatttgacggtatttacgcgatctgcgaagacaaggacaaggcgtttttcgccattgaaacgagcgagctgccgcagggtgcaaaggccggcgacgtgctgaagattaccgatgacggtgcgctttccatcgacgtggaggagaccgagcgccgccgcgcacgcattttagagaagcagaaaaagctgatggggctgtaagaaggggcggcttatgggaagactgaaatatatttttcactgcattctgcacatggattataaatcgctgttcgatacggtgaaaacggtgcatgaggtgagcggtaaaaaccgtatttggctgttttttgacatcatcaagtgcggctttaagtacggtgcgggctacaaggattaccttttatgcgcgttttatgacctgagtgacaagcagcgtgcgacgtatgtgacgcgcggcatcaataactccattgtaaaaagcctcaacgaccccgcgtattaccatatttttgacaacaaaagcgagttttacacgacgtttgcggaatatttgcaccgcgagtggctgcatttttccaagtgcacaaaagagcagtttttggactttatgcaggacaaagacgagatcatctgcaagccggacgacgcttcctgcggcgtgggtgtggaaaagctgaaaaaggccgactacgcaacgctcgacgccatgtatgaggacttaaagaaaaagggcgcggacgtgattgaagaggttgtcattcagcacccggatatgaaccgcatcaatcccggatccgtcaacaccatccgcgtgtacacggtgctttccgacggcgtatcgaacgtggtgtacgcgtgcatccgcatgggcaacagcgaccgaccggtggataacatcaatgccggcggcatgtattcgccgatcgacctcgagaccggcaaaatcgcgtgcgcggcgtgcgacaagcagcgcatcgtctatgagcgccacccgcgctcggggtgcttgctcaagggctaccggattccgtactgggacaaggtgatggacatttgccgtgaagcggcacataaggtgccgcagatgggctacatcggctgggacgtagcaatcacgaaggacggcccgctctttattgaagcgaacaacatgccgggtcatgacgcgttcccgcagatgccgttgcaggcgccggataagatcggcattttgccggtgttccaaaaatatatcaagggtctgtgatgaccgaggctgattttgtctcttccgggaaggcggaaaggcggcagcagagcttgcatagggcgcttgcggggatcgttaaaacgaaccagatgagcgaaaacggcagacagatctggcccatgatgttgagcggcagggcggagtaatcccacacatgcagatgaagcacgcggtttacgagcaggccgaataaaaattccacaacggttatgatgagggagcctatggcgcagcgcgccggaaggcttctttttttcattttttcgcagcatacggcgttgatgagcagcagacaaacgccgccggcaagtgccatggaggcgtgggaatagccgcgccacagcacttccaaaaggggataaaggccgctgccggcgaggaacaacagactgtttttgcggacggtacggttcatgggaaacgactcctttttcatgactttccttttcagtatgcccgctttttgtacgcctattgcaaaagaagcaacaaaatcgcaataaataagcatcaaaaaaaatacgcgcgctactgtacaaagcagcggaaactgtgtataatcagtacagacagaaagacagaaaggtcggtttcttatgaaaagaattttggttacgggcggcacaggctacattggcagccacacctgcatttctctccttgaaaagggctacgatgtgacgatcgtggataaccttgtaaacagcaaggcactggtggtagaccgaattgaaaatttgagcggcaaaaaagtgaagttctttgaagcggacgtgtgcgacgaggacgcgctgcgcaagatctttgcggaggacgagatttttgccgttatccattttgcaggcctgaaggcagtcggcgaatccgtgcagattccgttgcgttactatgaaaacaacctcatttcgactttgagtcttttgaaggtgatggcggagtttaaggtgaacaactttgtgttcagctcctcggcgacggtgtacggcaacccggcttccgtgccgatccgtgaggatttcccgctttcgacgacgaacccctacggcacgacaaagctgatgattgagcgcatcttgaaggactacgcgcacgcaaacccggattttaacccgatcatcctgcgctacttcaacccggtgggcgcgcacaagagcggcaccatcggcgaagacccgaacggcatcccgaacaaccttgtgccgtacatcacgcaggtggcggtgggcaagctgcgctgcctcggcgttttcggcgacgactacccgacgaaggacggcaccggcgtgcgcgattacattcatgtcgtcgaccttgcagagggccatgtggcggcgctcaagaaattcgacgatccgcactgcggcgtgaagatctacaacctcggtaccggcgtgggttactctgtgcttgacattgtgcacgcgtttgaaaagtgcgtcggccacaagattccgtatgagatcaagccgcgccgcgcgggcgacattccggagtgctacgcagactgcacgaaggcgtatgaggagctcggctggaaggcgcagaagacgctggacgacatgtgtgcggactcctggcgctggcagacgcagaacccgaacggctacaacggctgatggcacgcttcgttttagcctcgtcctccgtgaaccgcaaggagattctggaacgcgcgggcatcgagtttacagtgatcgtctcgaatgccgatgaatcgaacgggccgaaggcgccagacgcgcttgtaaaggagctttcccgccgcaagctggaagcggttttgccgaagtgcgaaagtgacgatcttgtaatcgcggcggacacggtggtgtacatcgacggcgaaattctcggcaaaccgaaagacttaacggatgcaaaccgtttcatgcacctgctttccgggcatgtgcacacggtgtttaccggcgtgtgcatggcgtatcacggcgagcgcgtttcgttcagtcaggagacgaaggtaaagttctatcccctgacagaaagcgaaatcgcggcttacgtgcagagcggcgagccgatgggcaaggccggcggctacggcattcagggcccggcggcgctgtttgtagagagtattgagggcgactacaacaacattttcggtctgcctgcggcgcacgtgatgcaggaagcgaaaaagcttttaaaggcagacaaaatatgagacaggcacgatcagtccttttcggcgtatactggcgtatcggaaaggactgatgatttatgtaccggtatcgccgaagacggtataaacgcggacgtaaacggcgcgtgttggcgtttttgctgctcgttttcgcttttgtgtttgccgagctgcgactgcccgcgatgaaagcggagctgcgcacggcagcactgacggcgcacgcgcaagggtgcatcgcgaaaacggtgccggagtatctgccgcagaccgtctgcgaaaaggacggggcagagacggcgctttctacatatgcgctcggcgtactggaagcggagctgacggatgctttgcggaaaagcttgaacggcacggcaaaggcgtttgtgccgctcggaaatttaacggggctgatgcttttgaacgggcgcgggatgaagatacccgtgcggttttcggtggaaagtgcggtttcggtgcggtttgaaagcgtcttgacgggcgcgggcatcaaccgcacggcgtaccgaacggtgctgcatattgaagcggtgctgttcacggcggagcgagacggggcggagcctgtgacggtgacggcagcataccccgtgtatgaagcggtgcttgcgggcgacgtgccgcagtacggcgtggtgcgcgcaggataaaaaattgtgaataaccgttggatttttgcgcgctttgtggtaagatactaacaagtatcgaaatatcttgaaatgacacggagttttaacttatgacgcacgaacaggcccggcagcagattgacgcgctgcgggaacagatcgagtaccacaataaaaaatactacacagaggacgcgccggaaatcagcgactatgcgtacgacatgctgtaccgccgcttggaaaatctggaagcggcgttcccggagctgaaaacagaggactcgccgacgaaccgcgtgggcgcagcggggtacaacacgtttgcggaagtgacgcacaccgtgccgatggagagcctgcacgactcgttttccgaagacgagctgcgcgactttgaccgccgcgtgcgcgccgttgtggacgacccggtgtatgtggtagagccgaaattcgacggcctttccgtggcgctggaatacgtgaacggcgtgtacacgcgcggctctacgcgcggcgacggcattacgggcgaagacgtgacgttgaatatcggtacgatcaaatccgtaccgaagacgctcaaagagccgctgccgtttttggaggtgcgcggcgaggtatatatgtcggacgaaagctttttgcggctgtgcgagcggcaggagcttttggaagaaaagccgtttaaaaacccgcgcaacgcggcggcggggtcgcttcgacagaaagacccgaagattacggcgcagcgcacgctggatatttttgtttttaacattcaggtcatcgagggtgagaccatcacgacgcatgcggacgcattgaagcgtttgcacgagcttggttttacggtgtcgccgctttattgccgcacgggcgacatagagacggtaatcgagaaaatccgtgagatcggcaacgagcgtggcacgttctcgtacccgattgacggcgctgttgtaaaagtggacagcttctctcagcgcgaggcactcggaagcacggcgaagttcccgcgctgggcggaggcgtacaagtacccgccggaggaaaaagagacgacgctccttgacatagaagttgctgtagggcgcacgggtgttttgacgccgaccggcgtgtttgagccggtgttcttagccggtacgacggtcagccgtgcgacgctgcacaaccaggatttcatcacggaaaaggatatccgcatcggctcgcgcgtcattatccgaaaggcgggcgagatcatcccggaggtcgtttccgtggtctcgaacccggaggataccgcgccgtaccgtttgccggaaacgtgcccctcgtgcggggaagttatcacgcgtgtggagggggaagcggcagcgcgctgcacgaatccgcagtgcccggcacagctgatgcgcaacctcattcattttgcgtcgcgcgacgcgatggacattgacggattgggaccggcggcgctggagcagctgagcgcagcgcttcaggtgcactcgccggctgatttatacgacattacggcacaggagcttgaaacgcttgatcgtttcggcaaaaagagcgcggaaaacctcgttgcggcgatccaaaaatcgaaagaaaacgatttatcaaagctgctgtttgcgctcggcattccgcacattggcgcgaaggcggcaaagctgcttgcgggcgcgttcggaaatatggatgctttgattgcggcggacgaggagcagattgcggcgatagacggctttggcggcattatggcgcaggaggtctacgcgtttttcagaagacactcggcgatagagctcattgaccggctaaaagcggcgggcgtgaacatgacggcggaagcggtcacgacggacacgaaattcctcggcaagacgtttgtgctgacgggtacgctgccgaatttgaagcgcacggaggccgcagcgctgattgaaaaggcgggcggaaaggtgagcggctcggtctcgaaaaagacgagctatgttgtggcgggcgaagaagccggcagcaagcttacgaaggcgcagacgctgggcatccccgtattgacggaagcggagcttttgacgcttttaagcagtgaggacaacacggaaaggaacgaagcataatggcagaagaaagaaaaacggacgaagcgcttgaaaaagccgtggagaccgatgaggacattgaccgctatatccgcgagctgacgggaaaggaaacgccgaaggacaaggagaagaaggcggaagaaaagaaagcgccggaaaaagaagaattccgcgtgacgagccagatcggcgaggacgactacaaggcattcatttattactctacgcttgggcgctttaagtggctcatcccggcgtttatcatcgtgccactcgtgttctcgttcctctttgcgttcaacgcggggcatttttacgtgggcaatttcattttatcgctgcttatcatgtatgtggcgattacactgattgttgtcattcgctgcacgcgctggctttctaaaattcgcaacaacaatcctgccgtgatgcacctgacggagacgacgcttattttcatgacgaacagcgtcatcaacatgaaaaacggcaaccgcatcaaggtcgattacaagcacatgatcgacgtgggcgagagcagacagcactacatcatgtattttgataacggcaaatccatggtattcagaaaagaagatatggaaaaggagacgttggaaaggttccgcccgtttatcgaatctaaagtacataaattaaaatttacacagatgctcaaaaaataaaccgggaggtttttcagcatggtcatcgatttaaaaacactgtacggcgcggaagcgaccgagcagcagaagcgttatgaggagctttccgcttactttgcggaggagttcggggatgctaatgcgctttcatatttcagtgcgccgggcagaaccgaggtgggcggcaaccacaccgaccacaacaacggcaaggtgctggcggcggctgtgaatctggacgttattgcggcggtgaagaagaccgagaacggcgtgatccgcctgaaatccgtcgggttcccgatggacacggtcgatacggcagaccttaacgtgcaggaagcggaaaaggagcgctcggcatcgctcatccgcggcgtgtgcgcacgtttaaaggcgctcggctatgaagtgggcggctttgatgcggtgacgacctcaagagttttaaagggctccggcctttcaagctccgcggcgtttgaggtgcttgtggtgacgattttaagctacctgtataatgacgacgcgatcgaccccgtggaggcggcacagatctcaaaatttgccgaaaacgtgtacttcggcaagccctccggcttactcgaccagatggcggcgagtgtgggcggctttacgacgatggactttaaagacctttccgcgccgaagattgagaagatcgattttgaccttgaccgttacggctatgcgctgtgcgtcgtcgatacgggcggaaaccatgccgacctgaccggcgaatacgcagccattccggcggagatgaagcgcgttgcgaaggcgcttggcggcgaagtgctgcgcgaggtaagcgaggaggagttttataagaaaattcccgagctcagaaaagaagtcggcgaccgcgcgattttgcgtgcgattcacttcttcgacgacaaccgtgtggtggatcaggaagtggcagcgctgaaagcgggtgattttgagacgttcaagcagtgcgtgattgcctcgggtcattcctcggcgatgaatttgcagaatgtgttcgcagttgtgaatccgcaggagcagggcttgtccctcgcgttggcgcttatggcgaagatcctcggtggcaagggcgcgtatcgcgtgcacggcggcggttttgccggcacggtgcaggcgtatgtgccgctcgatatgctggatgcgttcaaggcagagatgcagagcgtgtttggcgaaaagagctgctatgtgctctccgtgcgcagcgcgggcggcacgaaagtgacaatcgaataagtttaacggcggctttggtttttagagccgccgtttttgcgtattgcgggaaatacgtgttgcgaaattgtaaatattgggaaacggtggatttcgccttgcgaatcatgccgatttgtggtatagtatactctgtatcattatgacagcttaccgcagacagcttgtctgcgtgcgataaaggagaatgttttttgaaggataaagaaatcaccgttacggcagacgagctgcaaaagcagaagctatacacggcggacgttgcggcgatcatgcaggtgcgcgcgatgcacggcacgccgaaggcgcttgtgcgcacgtatggctgccagcagaatgtggcggacggcgaacgcatgaagggtatgctctctgaaatgggctttgaattcactgaatatgaagatgaagccgattttattctgttcaacacctgcgccattcgcgagcacgccgaagaccgcgtgttcggcaacatcggcgcgctgaaaaacgtgaaacgccgcaacccgtcgctgctcattgccgtatgcggctgcatgatggaacaggagcgcgtggcggagcgcattaaggtgtcgttcccgtttgtgaacattgtgttcggcacacacgtcatccaccgactgccggagatgatgtacaccgccgtgaccgactcgaagcgcgtttttttgcgcgggcatgaatcgaaagagatcattgaaggtctgccggtgcgccgcgacggcaacacacgcgcgtgggtgaccgtgatgtacggctgcgacaatttctgctcgtactgcattgtgccgtatgtgcgcggccgggaaaagagccgccacccggatgccatcgtcgccgagtgccgcgaactcattgagcagggctacaaagaaattacgctgcttggacagaatgtgaattcctacggcaagggcttgccggagaaagtgaatttttcggagcttctgcgccgcattgacgcgattgacggcgactaccgtttgcgctttatgacctcgcacccgaaggacgcgacgcacgagctgttcgacacgattgcggagagccggcacatctgccactacatccacctgccgtgccagtccggcagcagccgtgtgttaaaggcgatgaaccgccactacgaccgcgaaaaataccttgacctcatccgctatgcgaaagagaaaatgcccgatctgtcgctgacctccgacattatcgtcggctttccgggcgagacgtatgaggagttctgcgagacgctgagcctcatccgcgagatggagttcacgtcgctctttacgtttattttctcgccgcgccccggcacgagagccgccgaaatggaagaccctgtcacgtacaaggagaaaacgcagtggttctcggagcttttgaagacacaggaggagattgccgcaaagcgctgcgcttccatggtgggcagcacggagcgtgtgctcattgaagagcgcaacgagaaaaacggtttgctcagcggtcgcaccgcaagcagcatcattgtggaattccccggcgaagacgaatggatcggcgaattcaaaaatgtaaaagtgaccgaagcgcgcaactggattttgcgcggcgaatgtgtagactaagcaaaacgggttttgacccattgctttttcaaaatacaataaaatttataatttattttaaggagctattactatggatatcatgaaactgacaagagaactcggccgcgctttgcagcaggaccagacctacatcaacatgagcgttgcggagcagcagtgcaacgaggacgaagctttgcagaacgccatcggcgaattcaacttaaagcgcatggccatcaacaacgaggcggcgaaggaagaccgcagcgaggaacttatcgagcagtacaacaaagaactgcgcgagatttacggcagagtgatgcagaacgagcatatggcggcgtatcaggcggcaaagaacgagtttgatgcgctgatgcagcgcgtgacgggtgtgctttccatgtgcgcggagggtcaggacccggatggctgcgatcccgatgcctgcggctgcaccggcagctgtgcgacctgcggcggtggctgccactaaggcagaattttgcaaagtttgcacgtgatctgcttgcatcttttccgccataccggtcgtaaagtccttgacaggcgccggcctgcctgcggaatttactacgcaaggcatatacgctcatgacgaaaaatctgacggcgcatctcgcgcacctactttacaaaaatctgcctttggcagtaattcacttgttgactgaatcttaacgatatggaggccgggcatggctgattattccccgatgatgaaacagtactttgaagtgaaggaaaagtacccgaacacgctccttttctttcgccttggggacttttacgagatgttctttaacgatgcgaaaatcgcgtcgcgtgagctggagctgacgctgacaggccgtgactgcggccaggaggagcgcgcgccgatgtgcggcgtgccgttccacagcgcggagacgtatatcgcgcggcttgtggcaaagggctacaaggttgccatctgcgagcagatggaagacccggcgcttgcaaagggcatcgtaaagcgcagcgttatccgcgtcatcacgcccggcaccgttatggaaagcagcatgctcgacgaggcgaagaacaactacatcgcttccgcgtattatcagggtgataaggtgggcatctgctttgcggatatttcaacgggcgagctggaggcgacgacgctgacggcggagaagggtgagtcgctctcccgcgcggttatcgacgcgctgtcgcgatttacgccgcgcgaaatcctcatcaatccggaatttaccgatttgacggacgtggcgaaattcatttccgataagctttcggcgtcactcgagtgcatggattttgcggtttacgaaccgctgcatgcggaagaaacggtgaaggcgcagtttcaccccgaggttttggaacgctccgacgttttgaatttcccggagatcacggcggcgctgagcgctttgctcgagtatctcagccgcacgcaaatcacgggtttggagcgcatggaggaaattcgcatatattcgcaggcgaagacgatgcggcttgatttaaacacgcgccgaaaccttgaattactcgagacgatgcgcagcaaggagcgccgcggctcgcttttgtgggtgcttgacaagaccaaaacggcgatgggcaagcggcttatccgcacatggctcgagcagccgcttttgagcccggcgggcattacgctgcggcaaaacgcggtggaggagctgtttgagaaccgcccgcttttagacgatgtgaccgaggcgctgacgggcatttttgacctggagcgcattatgacgcgcgtggtgtacggctctgtaaacggcaaagacctgcgtgcgctgtggtcggcgctgacgcgcttgccgcagctgaaagcgctttctgcgacgtttaaagcgacgatgctgcgcgacatcgacagccgcatggatgtgctctccgatatttgcgagctcattgaccgcgccgttgtggaggagccgccgcacacgatccgtgagggcggcattatccgtgagggcttcaacgcggagcttgacgaagtgaaaagtgacatgacgaacggcaagcagctcatcgccgagctggaggcgcgcgagcgcgaagcgacgggcattccgaaactgcgcgtggggtataaccgcgtgttcgggtattaccttgaagtttcgaacgcgtttaaggacaagacgccggagcactacgtgcgcaagcagacgcttgcaaacggcgagcggtacatcacgcaggaattaaaggagcttgaaaaccgcatcttaggtgcgcacgaccgttctattgcacttgagggcaagctgtttgaagaagtgcgcaggacgattgcggggcagctgacccgcgtgcaggagacggcgaaggcgattgcggagctggatgttttggcatcgtttgcggcggtatctgtgcggaacgactacacgcgcccgaccattacggcgaacggcaggctgtatttaaaggacagccggcacccggtggtggaggcgctgctgacgggcagcacgccgtttgtgccgaacgaccttgagatggacccgaaccagaaccgtgtgtctatcattacgggcccgaacatggcgggtaaatctacatatatgcggcaggtggcggtcattgtcatcatggcgcagatcggctgctttgtgccggcgagcgcggcggagatcggcattgtggacggcatctacacgcgcgtgggcgcttctgacgaccttgcggcggggcagtccacgttcatggtggaaatggccgaggtggcggaaattttgaagagcgccacgaaggacagcttgctgattttagatgagatcggccgcggtacctcgacgtttgacggcatgagcattgcgcgggcggtcatcgaatacgtacacgacaaaaagctgtgcggtgcgaagacgctgtttgcgacgcattaccacgagctgacggagctggaagaccttttgcccggtgtgcagaacttcagtattgcggtgaaaaagcgcggggacgacatcacgttcctgcggcgtatcgtgcgcggcggcgcggacgacagcttcggtattgaggtcgcgaagctcgcgggcgtgccggacaaggtggtgcggcgtgcgaaagaggtgttaaagagccttgagagcggcgagatggtgaaaaaaccgaaaaacgccgtgaaagtgcagcaggaggaaccgatacagctgacgatgctgacaaaggatacggaggttttaaaccgcctgaaaagcctggacgtcaacacgctgacgccgatcgaatccatgaacattttgtttgaacttgcaaatatgctgaaataaatttaacgcgaaaggaaggtgcagaaaatgccgaaaattcacgttttggaaaagcaggtcgcggagctgatcgctgccggtgaggtggtggagcgcccgtcttccgtcattaaggagcttgtggaaaactccattgactccggcgcgtcgattgtcacggtggaaattcgccgcggcggcgtgacgtatatccgtgtgacggacaatggctgcggcattgcgcgcgaggacgtggcgacggcatttctgcgccatgcaacgagcaaggtgcgcgaaaaggacgacttagacgcgattttgacgctcggcttccgcggtgaggcgctggcgtccatttcggctgtgtcgcgcgttgacctcatcacgcgcacggcggacagttcaatcggcacgcactattcctccgagggcggcagcgacgtggagatcgaagacgcgggctgcccacttggcacgaccattacggcgcgcgacctgttttttaacgtgccggcgcgtatgaagtttctgaagaaagacaccgcagagggcaactccgtggcggggctgatggacaaaattgcgctttcgcatccggaaatctcgttccgcctcattcgcgagggcaaggaagtgctgcacacgccgggcgacggcaagctgaactcggcaatctatgcggtgttcggcaaggagttttccggcgctttgctgccggtggattataccttgggcggcattcgcgtgcacgggtatatctcgtcgccgattgcgagccgaccgaaccgcagcatgcagaatttcttcatcaacgggcgttttgtgcgcagccgcacggcgtgtgtggcgctggaggaagcgtacaagggcgcgattatggtgggtaaattcccggcgtgcgtgctgcacatcgagctgccgtcgtcggtcgtcgacgtgaacgtgcatccggcgaagctggaggtgcgctttgtgaacgagcgtccggtgtttgatgcggtgtaccacggggtgaaatccgccgtgacggcgagccgcgatatgaagtccgttgaccttgcgcagcacgcaaggcggcctgttgacccgtataagccggatgtggtcgtaaagccgcagcaaatggtgctgaatccgccgccgaaaacggagacggtgaagccgatgcctgcgtcggtcgtgaagtctgcgcccgttatcaacacgagcaaaaaagaggcggaagcgccgtatgagccgcccgttgatatgccgccgatgccgcatacgttttcggacagcgcagagcgggaggaaaagccgcagcttgaaagtattcgtacgtcgatcgagcgcgttttggaggcggagccgcagccgatgacaaagccggaagtgataacggaagaaccgcccttaccgcagccgcccgagacggagcccgtgccgccggcgtgggaggaaacacccgtgcagacggaagcggtgcaggaaaatccggaaagcaacgcacagccggaaacatgcattgtgccggagacggagcgggatttaccccgcatggcgcataaggtgatcggcgaggtgtttgacacgtatatcatccttgaatacgacgcgcagacgctgatgtttattgacaagcatgccgcgcatgagcgactgctgtacgaaaagctcaaacggcgcgaagaagctgctatggcgcagacgctgcttgtgcccgtgacggtgacgatggacaaaaacgagtacacggcggttttgcagaatttgagtgtttttgagcaggcgggctttgacgtggaggatttcggcagcggtaccgttttggtgcgcagcgcgccgcttaatttgaacggtgcggacatcaaggactccgtgctcgaaatggcgggataccttgaagaaaacaagaccgacgcgacgacggagcacatggactggctgtaccacaacattgcgtgccgcgcagccattaagggtgggaacgcctcgaaaaaagaggagctcattgcacttgcggaagagctggaagcgaaccccgatgtgcgctactgcccgcacggcaggccgatctacgtgatgctgaaaaagcgaacgctggaaaaagaattcggcagagtttaacggtttgctcacaaacacggatgaaagttgtgttattataaagttatgtaaacaaaaagggggcgccggaatgacggaagtacaagagaaaatcaaggtattcgcggtgtgcgggccgacggcctccggcaagacctcgctttccgtaacgcttgcgaaaaagctccatgcggaggtggtttcgtgtgactcgatgcagatttataggggcatggagatcggcacggcaaagccgaccgcggacgagatgcagggtgtgccgcaccacctgatgggttttcaggatcctgcggagccgttcagcgtgagcgactatgtggcgcttgcaggaaaggtgatcgaagacatacgtgcgcgtggcaaaaacgtgttgcttgtcggtggcacgggcttatatgcgcgctcgcttttaaaggcggtgccgtttacggaaaacagccgtgacgatgaaatccgcggtaatttggaagcggaatttgcggcagacggcattgaaccgctttatgcgcggctaaaagagcttgaccccgagggggccgagggtatccatccgaataatatgcgtagggtcatccgcgcacttgaatactgcatggtgacgggcgagccgttctcgaagcaggcgaaggactcgaaagcggtggaatcgccgtatgacgggaaaatgttggtgctgtctttcagagaccgcgagacgctttacgggcgtatcaacctgcgcgtggagcagatgtttgcagacggcctattaaaagaagccgaggattattttaagcggtatggcacgccggggcagacctccgtgcaggccatcggctacaaggagctgttcccgtattttgaggggcagtgctccttagacgaagcaaaggaaaatataaaaagggaaacacggcgctatgccaagcgccaattgacgtggttccgccgggaggaagatgccgtgtggctttttgcggatgattttgatgccccggcagacctgataagcgcggcagaggacatagcccgcgcgcattttgaagactgaaaggaagccccgctatgggaagcaacacattatttcgtaaaatcagttcgatcgccgtggcgattttgcttttgatatatgtaggctaccagatttacagaagccaatacaccggatttaaaacggaaacggccatgtacgctgacctttccgcatccatcgacaccacgggctttattatccgcaatgaggagcttgtgtactcgcggtacgacggcgttttgaactacacgctcgacgacggagagaaaacggcgttcggcggcacggtagcagagctgtaccccgcggaagaggacgccgccgcacacaaccgcatgctgcgcatcgacgaggagcttacgcggctagccgtgctggagaaccccacagaggtcgcgtcctcgaacccgaagaacatcggcagccagatcaataaaacggtcacagggctgctttccgatttgaaatccggtgcgttttcgtcgatctcgaacgataaaaacgacctgtacctcttgatgggccaaaagcagatcgtgacgggcgcggaggattccgcgagctatgtggcgcacattgagaatttgaaatcggaacgtgcaacgctggagacgacgacctcttcaagcaccggcacggtaacgtcgccggcttccggttattttatccatacggtggacggctacgaaaacgcggtggacatcgacgatgtggagcagctgaccgtaagcgatgtgcgtgcgctggaggaaggcgaagcgggcagcaatgcggacagcacggtcatcggcaaggtggcaaaggaattcaactggtacattgcgtgcatcatcgatgaaaacgaccttgtgcggcttgaccgcacgacgaatgtgaaggtggagatgccgtttgcgacggcggagacaatcccggccgaggtcgtgaagatcaatagggacgaagcgagcggggacgcagtggccattttgaagtgctcttacatgaacacagaccttgccgccgcgcgcaaggagccgctgcgcatcgatttacagtcgtatgccggtgtgctcgtgaacgaaaaggccatccactttgcggatgtgaccgtgacggatacggacacggacggcaatgtgacggagcatgtggaacagaacgtgaagggtgtttacatcaagtccggcagccgcgtgcgctttgtacaggtattctccgatgcgacgatcgacggctatgccgtgtgcaagctgaacctttcctcctcggaaaaagagcagctcgtcacctcgagaacgatacagctttacgatgaagtcattgtggaagggacggatctttatgacggaaaaatgctttgaggagcgttttagggacgtagaggaaaactataaggccatcacgaaccgcattgcggaggcagcggtgcgctccggcagaaagcccgaggacatcacgtttcttgcggcgacgaagaccgtgccggcggaggtcatcaaccacgccatcggctgcggcctgcgcttcatcggcgaaaaccgcgtgcaggaattcatggacaaatatgaaaagatcgattgggacaagggcgtttccggccagatcatcgggcgcttgcagacgaacaaggtgaaatatatcatcgataaggtcgactgcatccagtcggtggattccgtaaagcttgcaaaggaaatttcccgccttgcggagaaaataggccgcaaaatgccggtgctcattgaagtgaatatcggcggggaagaaagcaagggcggcatcgaaaaagctgcgctgcccgagttattggaagaaattgccgtgctgccgggcattcaggtaaacggattgatggcaattccaccaatttgtgcggaaaaatccgcgctatgcaattatttttcccaaatgcatcaatcttttattgacatccgcgccaaaaaaatagataatgtatttatgaattgcctttcgatgggtatgtcttccgattacgcggaggccatcgagtgcggcgccactatggtgcgcatcggctcttcgcttttcggcccgcgcgactacacgcgctgaccgaccctgttatgcagaaaatggaggtataatatatggcaggcattgtagagaagcttcagaaaatgtggaacccgcccgacgacgagtatgatgaatactacgaggacgaggccacggagcccacggcagacagccgcgaggagcagccttccgcacgccgttcgttctcctcttcaagctcgaaccgcgttgtgaacattaaccacgcacgcgcaggcgcacaggtggttgtgtttaagccgaactctttccgtgacgacacaaatagcattgcggatgagatcaaccagggccatacggttgttgtgaattttgaagagacgaacgcgagcgaggcgcgctatattctggcgttcctcagcggcgcttcttacgcgaaccacggcgaggtgagacccatcgccgcgaagacttatattttcacgcctgcgggcgtgagcctgagcggtgcggagattcgcgatgatcttgcacagaacggcgtaacgttctgatatggccgcacaggaagacaagctttttgaagcgaaaatagaggattgcctgcgccttggcgaaaaaaggccggcgttcttgggctttttggatctttccgagcgcgcgtacgcagaagaatatttgcgccgtgcacatgcggaaaattaccgatttttcggtggctttcccgaagcggagcgaacggttttgggcgtgtttcctgactacatggaacccttagatgaggagttcccggtgacggggctcacggtgaagtttcgccggcaggatgcgctttcacaccgcgattttatgggctcatttctggcacagggcgtggtgcgtgcatcgctcggcgatattctggccgaagaagggcgcgccgtgctgtttgtgaaaacagagcttgcgccgcactttctttcgcagatcgataagatcggtcgggtgggggtgcagattacaaagggctttacagatccgctgccgcaggcgcacagctttcagccgatgggcggcgtggtcgcttcggaacgcttagactgcttggttgcctttttggcgggcaccggcagggaaaaagccgcgcagatggtgcacgcgggtttggtttccgtcaaccatagggagacggattccgtttcgcaccgtgtaaatgaaggagacatcatctccatacgccgctgcgggcgatttattgttgatatgctcggcccggtcacgaaaaagggccgtttatctgtgaaatgcagaaaatacatataggaggcttacacacatgttatcgattaaagacatcaatgaagtcagcttcagaaaatcaaatttttccggttacaattctgatgatgtcgatcagtttattgatgaagttttggagaccgtaacggcactcacaaaggaaaacgcagagattaaaacgcgcaagacggatgattccgccgctgtgcagcagttacaggcgaaaaacgccgagctgcaggagaagctttctattttggctgcaaaaattgagtcttaccgtgcagaggaagacggtattaaggacgcaatcctcagcgcacagcgccttggcaatgcttccatccgtgaggcaaaggcgaaggccgagaagattgtgaacgacgcaaacgcgaaggcggacgctcttgtaaaagatgcgaagggccgctccgaaacgcttgtgaagtcctatgaaaagcagatcgccgcaaaagagaaagagctggagaacatgaagcgcgaggtgacaaacttccgcgcatcgctctacggcatttataaagaacaccttgccgtgattgagaagattccgacgtttgacctgccggaggaagagcaggaggaaaaagcgcccgccgaggaaccgacgccggtatacaccgagcctgaagtgattgaggagccggaagaagaaatcccggtgcctgcggcacagcaggtcaaagaggaacccgcaccggcccccgcagagccgaagcccgctcccgcacctgtcccggagccgatccccgcaccggcgccggtacagccgcagcctgtttacgacaaggactcttatattaaggagcagttcagcggcatcggccttgatctgaacgcttacgccgacatcccggaatctttgcagaaagaaaaggaggcccttttcagcacgctggagttcggcgttgaagacgaaggcgacaagaaaaagggtaaatttaagagaagataaaaccagcagaaaggcacggatcaatatatggattacaaaagcacattgaacctccccaagaccgactttgccatgcaggccggcctaccgaagcgcgagccggtaatgctcgaaaagtggtatgaagacaaggtttacgagaccgttctcgaaaagaacgacggtaagccgctttatgttctgcacgacggccctccgtatgcaaacggcgatatccacctcggcacggcgctgaataagacgctgaaagactttatcgttcgctacaagaatatgtccggctttaaggcaccgtacgttcccggctgggatacccacggcttgccgaccgagctgaaggccagaaagaaagcgggcgtttcgaattccactgcaatctccgacatcgagctgcgcaagctctgccgcgagtttgccctcggctacctcgatgagcagcgcaactccttcaagcgtcttggcggcatcggtgaatgggacaacccgtatgtcactctgcgcaaggaatttgaagcaaagcagatcgagatcttctccgaaatggcgacgaagggcctcatctataagggcttaaagccggtttactggtgcccggagtgcgagactgcactggcggaagccgagattgaatacgcagaggatccctgccactccatctatgtgaagttccgcgtgacggacgacaagggccttttgaccccgatgggcgcagacctgagtaagacctacttcgtaatctggacgacgacgacctggacgctccccgcgaacgtcgcgatttgcgtcggcccggaatttgaatatgcacttgtaaagtccggcgacgaatactatgtgatggcaacggccctgaccgaatctgccatgcaggcggcgggcaagaccgattacgagattcttggcaccttaaagggcagcgatcttgagtatatgaagacggcgcacccgttcatcgaccgcacatctctcgtcatcgtgggcgaccacgttacgttggaaagcggtaccggctgcgttcacacggctccgggccacggcgtcgaagactatgacgtctgccacaatcactatcccgaaattccgattgttgtgccggtggacagccatggcaagatgaccgaggaagcgggccagtttgcaggcctgacgaccgaggaagcgaacaaggcgattgcacagcaccttgaggatacaggcgcactgttcgctttacagaagatcatccaccagtatccgcactgctggcgctgcaagaagccggttctgttccgtgcgaccgagcagtggttctgctccgtggacgctatcaaggatcaggctattgaagccatcaagggcgtaaagtggatcccgggttggggcgaagaccgcatttcctccatggtccgtgaccgcaacgactggtgtatctcccgtcagcgtcgctggggtgtgccgattccgattttctactgcaaggactgcggcgagccgctcatcgagaaggacgcaatgcacgcagtttccgagctgttccgcgcagagggctccgatgcttggtacatcaaggaagcggaagaaattctgcccgcaggcacaaagtgcaagaagtgcggctgcacctcctttacaaaagagcgcgacatcatggacgtttggtttgattccggcgtgacccatgctgccgtttgcgatacacgcgattatctccattggccggctgacctgtaccttgagggtgcagaccagtaccgcggctggttccagtcttcgctgctcacgtccattgcatggcgcggcaaagcgccgtacaaggctgtcgtcacacacggctgggttgtggacggtcagggcagaaagatgagtaagtccctcggcaacggcattttgccgcaggagattgtggataagtacggcgcagatatcctgcgtctgtgggtcgcttcttccgactaccatgccgatatccgcatctccccggaaatcctcaaacagctttccgatgcatacagaaagatccgcaacacagcgcgctatatgctcggcaacctttccgattttaatccggataccgacagtgtagaggtttctgagatgctttccatcgataagtgggcgctgaaccgtttggatcggctgatggtgaaggtgcgcgagggctatgagtccttcgagttccaccaggcttaccacgccatccataacttctgcgttgtggatatgtcgaacttctatctcgacgtcatcaaggatcgtctgtacaccgagaagaaggactccgctgcacgccgcgccgcgcagactgcgatgtatatcatcctcgatgcgatgacccgtctggtcgcgccgatcttggcgttcacctccgacgagatctggcagagcatgccgcacgcttccgattgcgatgcacgccacgttgtttacaacgagatgccgaagccgacgagcgaaaagtacggcatcgacgtgacggaagaattcatcgcacgctgggatagaatccatgcaatccgcgatgttgtgaagaaggcgcttgaaaacgcacgtgcagagaagacgatcggtgcatcgctcgatgcaaaggtcacgctgttctgcaccggcgagctgtatgcgttcctcaagtctgtggaagacgagcttgcaaccgtgttcatcgtatctcaggtcgagatcgtggacggcgagggcggcacactttccgacgatgcacttggcctctccgtgcaggtcgataaggcagaaggctgcaagtgcatgcgctgctggacatattcctccacggtcggcaaaaacccggcatacgtggatctgtgcgagcgctgcgcaaaagcactttccgaataatttcggacacattgaatttgttttaaacggtacgtgcttaatgacgccgtgctgttgaataattgaaccgaaccaaggtgcaaaccggttttgcccggcttgcgcctttttcgggttataaggggatatttcttttgtccattctcattcttttgctgatcgccgtactgacagctgtcgatcagtttataaaaatgacggttatcacaaacttaaagcccatcggcagcgtgacgtgcattccgggccttttggagttccgttaccttgaaaacaacggtgcggcattcggcttttttgccgggctttcgtggcttttgatcatactgacgatagggcttatggcagcgttgctcgtgcttttgttccgctataagcaccacacatggatgtcgcgcacgtcgtgcgtgctcatcatcgcgggcggcatcggtaacctcattgaccgttttattttcggctatgtggtcgattacatccatgtgctgttttttccgtatgtgttcaactttgcagactgctgcgtggtggtcggtgcgattttgtttgccgtgtggtacttattctttaaagacaaaaaagaagcggcagataaaaaagtgaacgagccgacggaaacgactgccgacggggtcgggaaataagtatggcggagctgcatgagattgaggtcacagcggcgggctggcgcgccgataagctgattgcggaggcgctgccggagctttcccgctctgcggtgcagaatttgatccgcgacgggcacgtgacctgcgataataagattgtgcagaaaagcgcgaagcttgcgccggggagcgttttgtgcgtggagattcccgaagcgcgcccgctcgacgtgaaggcggagaacattccgcttgacatcgtatatgaagatgacgacctacttgtggtgaacaagccgaagggtatggtagtgcacccggcagcgggcaattatgacggtacacttgtgaacgcactgctgtaccactgcggcgattcgctttcgggcatcaacggcgtgattcgcccgggcattgtgcaccgcattgacaagaacacgagcgggctgctcatcgtcgcgaagaatgacaccgcgcaccggcacttggcggagcagatcaaggcgcacagctttacgcgcgaataccgcgccgtggtgtacgggaaaattcgcgaggacggcacggtggatgcgcccatcgcacgtcatccgcaggacagaaagcgcatggcggtacaaaacacgccgaacgcgagaaacgccgtgacgcactattttgtcacaaaaaattttacgggatttacgcagctgcgcctgcgccttgagaccggacgcacgcaccagatccgtgtgcacatggcgtatatcgggcatcctgtcgcgggcgacccggtctacggaccgaaaaaagtcatcacgcagctgcatgggcagtgcctgcacgcggggctcatcgggttcatccacccgcgcacgggcgaatatatggagtttgaagcgccgctgccgccatattttacggattttgtgaagacgctgcatgcggaggacaaataagggggagcgcttgtgcgcgcgggaagtcaacggacaattttactgttcgcactgtttttaatggcgtgtgcggcggtgctgttctgcgtttcctttgagaatacaccgcttgaaccgtacagggtgacatcgacagggcaaagcgaagcagcatcgagcgcgccggctgcatccgctttaagcgaagaaaaagtcaacatcaacaccgcgtcgaaggaagagttgattggcctgaacggcatcggagaagtactcgccgacagaatcatcgaataccgcgaagcaaacggtggatacaaagatgtgcgtgagctcacgaatgtaaaaggcatcggcgaaaagctgcttgagaaactgctgccgtatgtgacggtgtaaacaaaaaaggcatacgttccactctgtccgtttgacattgctttgaagaacgccggtgtgcagcacaagctgattccgcccagaacaccttggcacaacggcaaggtagagcggagtcatcgaaacgaccagcgctatttttacaactgggaaaagtttgtaagtgtaaaagatctaaaccgaaagtgcaaagatcatttgcgctggagcaacagaaagccctcttgatctcctctgtgaaattctttctaacgcctgattcttttctatccctcttttctttaccttctgtgggtcgtatctatctacaacgcagagaaaggcattaaaaatacttcatatcggttgcaatatgtcgaattatatgttaaaatgtaattaaacaattaatttggagtgggaagaaacatggttccttttaatagaccgccttatataggcaaagagatggagtatatttccaaagtaatcagagcgcataaaatttgtggtgatggacagtttacaaagaaatgccaccaattgctggagcagatgacaggaagccagaaggtgctcctgactacctctggcagccacgcactggagatggctgctcttctttgtaatctggagcccggggatgaggtgatcctgcccagctttactttctcgtctacggccaatgcctttgtgctggctggtgcaaagcttgtatttgtggatattcgtccggataccatgaacattgacgagaccaagatcgaggcagccattaccgataagacccgtgtgatcgttccggttcactatgcgggcgtggcctgtgagatggataccatcatggaaatcgccagaaagcacaatctgaaggtggtagaggatgcggcgcagggcgtcatgagtacctaccatggcaaggcgctgggcaccattggcgattttggctgcttcagcttccatgagaccaagaactactctatgggcgagggcggtgcactgctgatccgcgatgaagagaagaatgaggctgcggagatcctccgggaaaaaggcaccaaccggagccggttcttgcgggggcaggtggataagtatacttgggtgggctatggttcttcatatttgccctctgacatgaatgcggcctacctgctggcacagctggaagaggccgagaagatcaacaacgctcggcttgccagttggcaccactatcaggagcgtcttgcgccgctggagcagcagggaaagttggaaatcgcccacattccggagggctgcggccacaacgcgcacatgttctggatcaagcttcgtgatctagaggagcgtacggccatgatcgcctatctgaaggagcatgatatttactccatgttccattatgtccctctgcattccgccgaggctggactgaagtttggccgctttgcgggcaaagacgtttataccaccaaggagagcaaccggctgacccgcctgcctatgtattacgggctcacggaggaagaggtcaatacagtggtggagactgtaaaggggttctggaggtaagcgcacagcagcgggctactattcgctgctgcactgcggcaacgaaagcccgctcaaaataaataacggtaaggtaactcgccaaaaggggattgtgatttatgcttgtgactgtggccataccatgttacaaatcggccaagacactgccgcatgttgtggcagatattcaaaatcagttttcactccataaggaatatgaatatcagctggtactggtgaatgacggttctccggatcaagatgcaacgtttcagacaattgagacgctttgcagggaggatcctcggatcgtaggagtagaattgtccaaaaactttggtcaggcggctgcaaagatggctgcgctgcgctatgtgcagggtgacgtactggtgtatatggatgatgatgggcagcatgacgcacgaggaatttttccactggtccaggcggttgaagccggagctgacatggcaattgcggagttccatgggaaaaagcatacgctgtttaagcgctttaccagttggctgaacacagagatgctctgcctgacactgcaaaagcctaagaatatccatacgtcttcttttgcggcgtacagtaaatttctgattgaacgattaaaagaatatgataccccgtttgtctcgatgtttggctacgtgcttcagcatacaagaaaaattgtaaatgttcagctggagcatcatgagcggctggaaggccagtcgggctatacgctgaaaaagcttttgaagctatggagtgatggcgctttaagcttttccacagtgccgcttcgtctgattggaatgtttggaatcgcatcctgtgtggtaagccttgttatgtggacttgcgcagttgtaatggatgtaatgggaaagtcggcagcggtctgggcggttcttggggcaatgttcttccttgggggatgccttttttttgcactttccattttgggtgcatatattggaagggtgttcctgattcaatgtgaacagccgcaatatgtggttcggacggtgctgaattatgagcgggaaggagtccgggcgtgacaaagacatttgcaagctggctgaaaaagcacagagagattttgtgtgcgctgggaataaatttactgtttttactgatttgccggtgctttagccatatgcagtttggtacgaatgatgatcgtgatatcagcaatttgctggcgaatgtctatggcggcgaggacggatactatattgcttttgtaaatgtgtttttatgcaaggcattggctgcactttacaagattacgaataatgctgccaactggtatgtcataatctctgtgggagtttcctttatttcgctggcaacagcatcctatatcctgatgcaccgggcaaagcgctttccggctggggctgcgttgactataatttttgtgggagcgctttgcgagagtcactatattgtgtttcagtttacccagaacgcagcgttatatgttgcggtgggggcagttctgctggccgatatgctgcaggagacatcgagaaagggcaaactgttccgtggaattggcgggtgcgtgctcatgttgatgggcagcatgctgcgttatcagtccctatactttacattgccgtatcttgcgatgtttgcgggatatgaagtgctgtttgcgcacaaggacatgccgttactttcgtggctgaagaagaactggaaaacacttgcggttatgtgtatcagtgttttggtagcggttggagttcgcacggcaaatatggcgtattaccgtagtaatcctgctgcgctggattattatgaggaaaatgcaatgcgtgcggaactgctggattacggtgttccagactatgatgaaaatgcggaggcattgatggctttgggaatatccagagaggatttggatatgttcgcgaaccaaagctatctggataaagaggtgttcaaccgggatgttgtggaagcactggttggtatgaaatcagaacagtcagcttcctattccgcagtgaatcttaaaacagaagcaattgcagcggtttttcaggtaccagatgatgttcggcagcggcagttttggctccttttctttggggttgtgctgtttctgctgttttgtatggattggaagcgcttcctgttgctgctgggcaccctggttgtggcatttgtgatgatgtggtattttgtttctgtgggacgaatgccatacagagtctggtattcgatcactgcgccggcgctgctgttctgtatttatcttggaaccctgagctggcggaaacgaagtgtcgtggatcaggcagataaaaatatctggacaacattgggcggtgttgggcacgatatgggctgcacactgctgattctgacctgcgcagcagtgtgtgtcctgacgatttgtcatgcggcagaagatgacacagctgagattaccgatacctatcagaaagtaattgagtatgcggaatcatatcctgatgattttttcctgctggacaggccaacgatttcacgtctgacctataccagcacggcaacaccatttacctgtttctccagaactagccaccagaatgtatgcattcagggggggtgggtgtgctggacccctgccaatctttctgttttggaacgatgggggatgcccaatgtctatcaggcaattggtgagggcacggtggtatacatgatatgtacggttccgccagagcgggaactggcattcattcagtgccattacaatcccaatgttacaatggcgtgggtggacagcgtgaatgacctgatggtatatgggttttatattgcgacggaataacgatggaataacaatgaaagaagctgagactatggaaaaccagaagaagctcctgtttcttggcggaacaggagccatgtatgatgcggttgaacgtgcgaaacgcatgggtatctatacgattgtagtggattattatccgaattcacctgcaaagcggattgcggaccgctcatatttggccagcacgacagatattgatcgggtgttggaaattgcaagggaaaatgagatagacggtgtgtttactggattttctgatgcgaacttgatgcctgcatgcctggtggcggatacgcttggacttccgttttatgcaacgaaagagcaaatcaatgtaaccaccaacaaactgctgttcaaagagacctgcagagaatatgggatcccggtggtgccggagttccatttggatggtgacctgaaacgggaagatctggagctgatccaatacccggtgatcgtgaagccatcagatgcgtgggctagcaagggtgtttcaatctgtgaaaatgagaaagagctttgcgaagcggttccgtatgcactgaaattttcgcagaatcagtgcgtgatcgtggagcggtatatggctgcctatccggatgtgtgcatgtactttaatcttcagaatggtgtactgtcgttgtcttccatgtgcgagcgtgacatgaatcaggtgcaggaggggaaggccatgcagcccaatgcgttgttttacccctgccggtttattccgctctactatgaacagctggaggagaaactgaaaaatatgacagcaggtctcggcatgaaggacggcacgatgtttatgcagtgctttgtggtggatggcatgctgttgccttttgaaatgggctatcgcctgtgcggcgcacaggaatatattctctgcgcagctgagaatgagattgacagctgtcagatgatgctgaattatgcgctgttcggtgcatgcacaggctggaatgcggcagagaagaataagccgatgtttgaccacagtgatgtaattctgctggcactgatgaagccgggaaaaatcacccggattgatggattggaagcgctccgtgcaatgccggaaatcctcaatatcattcagttctactatgaaggcgatgagatcggaaaagggtctatgggaacgctgaaccagacatttgcaagaatcttcattcaggggaaagatgcagatcgtctgctggcgttgattgatcatgtgcagaaaactctgaaagtgcttgatgaaaatggcgagcagatgttgatctcgggctatgactgtaaaaaggcacatgtgctgaagcagtttgactgatacgggtcggagggaagaaaagatatggaaaaaaagaacgagtttacaaatgaagagctggcacaggcggtcaggtgggatattattgaaatgatctatcgggcaggaatgggtcatccgggttcatcgctgtcttgtgtggaaattcttgtagcactctatttgggcggtgtaatgaatgtggatccgcagaatcccgattggccggagagagatagatttgtgctttcaaaaggccatgcctcgccggcattgtattcggtgctggcacgccgcggatttttcccccgtgaaacgctgtcgacattccgtaaaaccggctctatgctgacggcatatccggatatgtctacgccgggcgtagatatggagtccggttctctaggtaatggtatttccactgctgttggaatggcgatttctgcaaaattaagaggttgttcttataaaacttattgcgttcttggcgatggagagttacaggagggtattgtttgggaggctgcaatgtgtgcagcacaccataatctggataacttgattgcttttgtagaccggaaccgacttcaaatcaccggaacagtagcagatgttatggatatttctcccttggaggaaaagtggcatgggtttgggtggaacgtcattaccattaatgggcacaactttgatgagatctatgcggctattgaactagcacagcgccatcaaggctctccgacggtcattattgcaaacaccgtaaagggaaaaggcgtttcctatatggaaaatgtgctgaaatggcatcggagtgttatttccgatgagcagtatcagcaggcgattactgaaattcatgcaagggaggaattgatatgagccagctcccaatcagaattatttttggcaaggagatcattcggcttgccgaggaatatggttattatgcagtgtgtgcagataccaagtgctgctcatttgaggattttggagatatttatccggaacgtcagatttcaattggaatcgctgaacaaaatttgattggagtagccagcggcttggccagctgcggacataaggttgtgctggcaacgtacagcgtatttgcaacgatgcgtgcctgtgaacagctcagaacgtatatttgccatcccaaacaggatgttatagtcatggggactcatgcagggctgcagactggctcggaaggcgtcagccatacagccattgaggacattgcgattcttcgtgccctgccgaatatgaccattattcagccgtcagatgctgtttctgccagagtgttggcaagaaaggcactggagttccatggcccgctgtatgtccggcttccttttgacgctgtagaggatatcaatgacgaagcaacctatcatgttgagatcggcaaggcaaattgggtaaagcgtcggggaaaagatgttaccctgattgccacgggaattatgctggaccgcactgtaaaggccgcgaaagcactggaagcccggggagtcaatgcgcagattatggagattcatacgctcaagcccattgaccgcgaggcagttattacagcggccggagagaccggcgcaattgtgacggtcgaagatcactctgtcattggcgggcttggcggagctgtagcagaggtgctggctacgaatttgccggtttctatgcgtatgattggtattcaggattgctttgcaagatccggagacgcagaggcactgtatgaggcaaatcatatgacggctgctgacatagtagcggcagcagaagaacttgtggagcggaagaaaatcagatgaagcagttaggaatcattgggctgggggctatgggagcgcccatggcaggcaaactacaagaatgtggatttcaactttttacgacagtgcgtagtgcgtatagtcgccagaaggcagaacgcatgggaatccaggtcttggagactgccggagaaattgcggagcgaacggaccgcattttgctgatggtttcaaattatgagcagtgccgcggttgcctgcaggggactgatggggtgttggctgcaatgaaaaagggaataatcattgtttccagtaccattgcgccggaacaaatgcgcctgctcagtgaaatgtgtccagagggaattgcacttttagacgcaccggtaagcggtggcgtaaccggtgccgaacagggaaaacttgtaacgatggcagcgggtgacagtcaggtatttgaggtatgcagggatatatttcaggcctattccaagaagatcgtttatgtgggcgctaagctgggacaaggccagatgctcaaggcagtcaatcaaatgctggttggaatccatattgcagcagcagcggaggcagtgtctttcagcgagtctatggggatcgatccgcaggtattgcaggatacaatctctgaatgtgcaggtaattctaatatgttccagagtagagtgcccaagctgatgaagcatgatttttcgtctcgtgcggcgcttgaaacgatggaaaaggattcaaaaatttgtattgatttggcggagaaggcaggggttccgtgctatttgacggaactctgtcatgacttgtataggaaaacgcctcgttccgagactgtacaagaggatgcttgcgcggtaattagagtgtatcagcaggcaaacggaaaggactcgaatctgacttgaaaaaatggaacgcaagcaataacgtagaaataagtggggagctgctgcaaatcagaggtgaaaatcggcatggatgacaaggaaaaagctggaattggtcaaatcggttttatgcagggcactgtgattgtatactcctttagcggagtgtttcagaaattggcgtcccgatacccgatgatttcaattcagtttctgctgttttatggatgctctatcggaattttatttgtatatgcagttttatggcagatgattttgcgcaaggtcccgctgacaacggcgtatagcaatcgtgctgtgtccatgatttggagtatggtatggagtgtactgctgtttcaagagagtaccagttggaatcagatcctcggtgcgatagtgatctgctacgggatatataaggttatggcatcgggggataagtaacgtgtggttgtatttcctaattgcgatcagctctgttctgattgcggatatttcacagattattctgaaaaaagcagcaatgaagccatatgatgcttggtataaagcgtacttaaatttttctgttatctttgcatacttcctttttgtggtatcaacagtctgctcggtgattgcgctgcgtaaacttccgctttcactctcgcccatgtggcagtctttgggacagatttttgtagtgatacttagctatttctttctgcatgagaaaattacgaaaggaaaactaaagggaatcgcaattattgtattgggaatcgtgattttctcacttccccttggataaataaaggttatattttaacaccaaagagtaaaacggaggatgcaaacagtgaaaggaattattttagccggcggcgccggcacgagactttacccgctgaccatggtaacatccaagcagttgctgcccgtatacgataagccgatgatctactatcccctgtctaccctgatgctggcggggatccgggacattctgatcatctctacgccggaggacaccccacgcttccacgatctgctggaagacggcagtcagtttggcatcactctttcttatgctgtgcaagaagcgccggaagggcttgcgcaggcgttactcatcggtaaagaattcatcggtgacgaaccgtgtgcaatgatcctcggcgataatattttctacggaaacggtttctcccgcattctccagaacgcaagcagcagagccgaaaacggcatatccacgatctttggctattatgtaacggatccagaacgcttcggtatcgtggaatttgatgatgcaggcaaggtgatctctgtggaagagaagccaaagcatccaaagagcaactatgccatcaccggcctgtacttctatcccaagggtgtgtcggatctggccaagagggtggagaagtcggatcgcggcgagctggaaattaccacgctcaacgaaatgtacttaaatcagggtaatctggatgtggagctgtttggacgtggctttgcgtggctggatactggtacaatggatagtcttgtagatgcagcagattttgtgcgtatggtcgaaaaacgtcagggcgtaaagatctccgcaccggaggagattgcttaccgcttcggctggatcgataaagaagaactgctgcgttctgcggaaaagtacggtaaatccccgtatggcacgcacttgaaaatagttgcagaaggtacgatcagaagttccgttcgcagtacgaagacccaggagtaagttccacagcacaaggagttagattatgacgatcatcgttaccggcggcgccggatttattggttccaattttatttttcacatactgaaagaatacccggattaccgcattgtctgcctcgataagttgacctacgcaggcaacctgtctacgctggcgcctgtcatggataacccaaatttccgctttgtgaaggccgatatctgcgaccgcgaagctgtaaataaactgtttgaagaagagcatccggacattgtggttaactttgcggcagaatctcatgttgaccgttctatcgaagatccgggcatcttcctccagacgaatattatgggtaccgcaacgctgatggacgcttgccgcaagtacggcatccagcgttatcatcaggtctctaccgacgaggtttacggcgacctgccgttggaccgtcccgacttgttcttcaccgaggagacaccgatccacaccagctctccgtacagcagctccaaagctgccgctgacctgctggttctggcttaccaccgtacctacggcctgcctgtgaccatttcccgctgctccaacaactacggtccttatcatttcccggagaagctgattccgctgatgatcgcgaatgctctggcagacaagccccttcctgtttacggcgagggtctgaacgtccgtgactggctgtatgtggaagaccattgcaaggccattgatttgattatccataagggtcgtgtgggcgaagtttacaatgtcggcggtcataatgaaaagcagaacatcgagatcgtaaaaatcatctgcaaggagctgggcaagccggagagtctgattacccatgttggtgaccgtaagggtcatgatatgcgttatgccatcgatccgaccaagattcataacgagttgggctggctgccggagaccaagtttgaggacggcattaaaaagaccatccagtggtatctcgataatcgtgagtggtgggagaccatcatcagcggtgagtatcagaattactacgaaaaaatgtacggtaatcgctgatgacaaacgatgtacagcagattcgaagcgctccggcgatcgatttgcaggagcactttggcaaaaagaaattgtttttcgtcttagcagcagcgcaggcggttctgctgttgtgcattcttcttttttgcagtataaaatatgaggtttcggatgatttcatcatggaaatggtggtttccggtgcgtataccggccacccagatgcccacatgatgttctccaacattttcattggctggctttttgtgccgctgtatagtcttttcccggcaataagctggtatttttggctgcaaatgcttctttgctttttgtcttttcttgcgctcacttatgtacttgtgcagaaacttcgtcttggcacagcggttctgactgttgtctggattacagcctttgccgcacgtgatctgtatatcttgccacagtttacaaaaacagcgattgtggcatctatgtgtggatgtctgttgtttgtttgggcgctgtttgaacaaaataggaggaaatgctgtgtattaggagctttgttggctataacgggatgtttggttcgtagagacgctttctttatggcgatagcgttttctagtgtacttgttgtttatcatatagtgatttgttttaagcaaaaacagatgaagttatatgagttttttcttaaaattgctgtaccagggatagtttttatagttactatctttttgtttaatattgtaaatgcacttacatatacagccaatccagattatacagaatactatacatttacgaaaatccgctcccagatattagattacacctggtgtgattatgaaaatctgcgcgacgaacttacagcaatcggcgtatcggaaaacgattatcaaatgattctgcattgggattttgcagatcaagcggtgtttagtacagagaagatgcagcaagtattggatattatcaatgcacatcgtgtgaatctgcatccgagtattcgcgaagcgctcagcatgattcggttgcgccaactctattatccgatgacgctttgctgtgtgctgctcggattattctgcgccattacaaatcccaaaaaattttgggtaccggcggtgttggcactgatggtgcttggatttctggtctatttttacagacttggacggtgggtctatcgcgtagaatttggttttctgttctgcgccgccgtattgatcgcgtatttctgtgagccgttttttaagcgcagcaaggcgacggaagctctgttgtgtgccgccgcgctcctggtaggcggatggcaggggataaactatctgccggacaatactgcacctatagaagacgctgtagcatatcgcatgtatgtagacggtacattttattattcggcaagctattctccggaaaaatacacgaaaactgtaattcccggcaaactgcgccccgaattcttagcacaagtgaacgaaacgccggaagatttatatgttttagattttggcacggcgattcagacgctgtactatgattttagtgtgtttaaaagcagccgagcctgctttccgaaaaatgtattgtttttgagtggtgtgacgcaaagccacccaagtgtgcaggactacattgagtccctcggctttgaaaatacgcttgcagctctgccaagcaaaaacgtctattacgtcagcaatacgtcgtctgaaacgcgtattttaacattttttcatgagcatggccattccgatatgcaggtgaccgcctgcggcacttttgatgattatacgctctggaagtatacggaaaccgttaactgaaaatgagggggctaaaacttgtttacaaaagcggaaacggctcgggtaaaagggatcggtatacttttactcctgtttcatcacttgttttataatgtggattttgttgaaaagacaaaaatggagtttcttttcttgtcggaagataggatccaaccagttgccgtcatggcgcgtgtatgcgtttggctgttcgtgtttttatccgcgtacggtttatctctgcaataccaaaaacgcgggggtgcaaattctgaaagtactttacaatttctgatccgacgttggttttccttgatgaaagctttttggccggtctatgtatttgtatttttcgggtattggatcgttagaggcaatccgatgcgtgtttatgaaaacagcgtgattcgaatgattgcggatgtgtttgctgtttcggattttttccaaaccggattgctcagcggcgtatggtggtatatgtgtctggcacagatcatcgtgcttctgatcccgctgatagacagcctgtgtgaacggctcggaatggcagtggttccgattggctttttactgcctcaattcattcccgattcgatccactccaaatatggcggcagctatttgaattatttcttagtcattcttctggcagctgcatgtgccaagggagacgtgctgaataactgatgtctcgaaaaatgaaacacggtaaatggtcggaagtcgtgtttgcgacggtattgttcttgggcgccgcgggacttttggttttgcgctttagtatctcgcagaacgatctgtggcaaatctgcggtttgctcagtgcgctggctgcgtttctgatcattgttctggttggacggtattttaaggcgcacgttatttctgctcctcttgagtttttaggaaaacactcaggaaatatgtttatggtccatgctttcttttacggaccgtgttccgctttggttttttggtcacataatgcaattttgagctattttacgcttttggtcatgagtttggccttctccatctcgatcgaagcgatcaaaaaatggtcaaagtataataaacggatgacaacggtcaccaattgggtaacaagtaaattacatgcttgatttctcaaaataaaaatccccgagttcgcctcgcagtgctctgcaaattgaactcgggggttcttctatcgcgttttatttacttccccaaaaattctctcaacgccgcatagtccacattctccggcttcacttggtcgaagaacgcaagcagcttttcggccagcacgcgttcgccgccgcttttttacttacttcaaaacgaccttatggaagacctttttgccttttttgatgatgacatggcctttttcaaaatcggctgcggtgcaggtcttggcgatatcggtgacctttacgtcgtcgacggaaacaccgccctgctgcacgaggcggcggccctcacccttagatgcaatgaggccggctttctgcatgaggtcgagaatgttgattgcgccgtcggtgaggtcggctgcggtgatctcggtggtcggcatgttctcggagtttgcgccgctgccgaacagtgcacgtgcggcttcctgtgccttccgggcttcctcagcgccatgtaccatctgtgtaagctcgaacgcgaggatctcctttgcgcggttcagctggctgccttcccagctttccatcttttcaatctcgtcaagcggcaggaacgtcagcatcttgatgcacttcaaaacgtcgctgtcgtctacgtttctccagtactggtagaaatcgaacggggaagttttgttcgggtcaagccacacggcgttgccggcggttttgcccatcttcttgccctgagaatcggtgagcagggtgatggtcatggctgcggcatccttgccgagttttctgcggatgagctccgtgccgccgagcatgttgctccactggtcgtcgccgccgaactgtaaattgcagccgtacttctggaacaaggcgtagaagtcgtagctttgcatgatcatgtagttgaactcaaggaaggagagacccttttccatgcgctgcttatagcactcggcgcgcagcatgttgttgacagagaagcatgcgcccacttcacgcaggagctcgacgtaattgagctttaagagccaatcggcgttattgaccatgagggccttgccgtcggagaaatcgatgaagttttccatctggcgcttgaagcaggcggcgttgtgctcgatgtcttccatcgtgagcatcttgcgcatgtcggtgcggccgctcgggtcgccgatcatcgtggtgccgccgccgatgagggcaattggcttgttgcccgccatctgcaggcgcttcattaaggtcagcgccatgaagtgaccagctgtaaggctgtctgcggtgcagtcaaagccgatgtagaacgtggcttcgccgttgttgataaggttgcggatgcgctcttcgtccgtgacctgtgcaatgaggccgcgggcctgcaattcttcgtaaatacccatgttgtttcgttcctttcgattttcaggttttgggcttttggggcaataaaaaagcccccttgatcttcaaggaggggaattttgaatataaaaaaacaccctcacttgatctatgagggcgaacacgtttcgttttgtggttcgcggtaccacctcagtttatttcaggctcacacctgaaacctcaacgggtacaaacatacccttgcgctgtaacgtgcgcacacggacttttttactgggaacccgttcaaaaagacagctccggaatgtatttcggcgttttttcgcacctgcttacaccacccgcaggctctctgtgccgatgaaaacgcgtacttctttctttcacagccattgtgcttattatagtcggcgcttttcggtttgtcaagcaccgtttttgattttttctacggcggctaaaagctgcgcctttttttcttcgctcgtcacccagcgcaggaacattttggtcgtgaggttttcggggagatcaagtgctttcaaaacgccttggcgcagtgtggcgctgtttacgccgccggtgagaccgagcgacatgaggtctgccggggtcaggggttgaaaatcggttgtgctgccctcaacggaagcgccggcttcttttaaaatttccagtaaaatttccgaggaaatgccctccacgccgagcttgccctctttggaaggcgccgctttgcgcttttctttgccgtaaatatccgggatatacgcgtggcgaatttgatttgacggcacgaaagacgtgatatacgcgcggatctgccgaccggcgttgtcactgtccgtcaaaatgacgatgccgcgctctttggcgagcttgcggatgaaatcgcgcttttcagcatccttgtagatgccaaagccgttcgttgtgacgatgatagcgtcggtcagcgcggaaagtttgcttttgtcataccggccctcgacgatgagggcttcgttcatgtggatcataagagctcctttaggccacgctgccgcggtgcgcaacgtacaaaagctgggcgaaaagcttttcgagtgcgattctgtccatgttttcaccgcccgaaagcttgatggaaagatcgcagttgagtaaaagcgaaaggcactcgcgcagcatttcgatggaaaggtcgcgcacgtcgcgctcggcatattttaatctaaaatcgcgaccgcggtaatcgccgtattccgtcggcgccatggacgttttgcccgcttcgattgcggcgcgcacgcggtacatgtcgatataagcgctgcttaaaacggccagaatcgtgtacggttcttcgcgctgggccatcagtagatcaagcagcgcatacgctttgctgtaatcgccgcgcacgagggcattgctcaagagaaacacggttgtttccatgtttttcgtgaccgttttttccacctgctcggcggtgatctcgccgccgcccgcaaaagcgcagagctttgtcacttcgtttgtgagggcgtttaagtcgttgccgacgtactgcacgatgcgctcggcaagcttgcgggagagcaggcagtttgccttttcggcctcgcggcagacgtatttttcgagctcgttgtctttcaggcgcagcgagggcagggaaaagccgcgcgtgtcaagcttctttaaaaacgtgcgccattttgcgctctttttcgggtcgatctcgagcgtgggcagataaagaataagcacggtcgtttcaggaatagtatcgagcaattcgtagagcttatcgagctccgcggtgttcatggcttccacgttgaggtcggagaccgtgacgcacttgcgctctgccataaacggcatggcgacaacggcgtccgcaatgctgtctacgggcgcgtcgtgcgggaattcctgaaagttgaattccgggaagttgccgtccagtttttttaacaggcgatttagattgcggcgtacgagcagcttttcatcgccgtacaaaaagtaaaggctgccgatttgctcttttgcaatctgttccttgagtttggtttccgtgatctcgggcatagtgttttcctttcgttgcggcttagccgccgtataccgtgtacgtgccgcgctcgtcaaaatcgagccggatgctttcgtgctccgtcataaagaggtatgcgccgggcgaaagcgaagcttcggtatcctctattataccatttgtttttaaaatcgtaaacggggcagagaccgcactttgcggtttttctgtcaccaaaatatctgtgtcgtgggaaagcgacgtgctgcgtttcgtttcaaggtaaatttccgtgccgtttacggtgaacgtgacggtctcgccgccgtccgtgaccgtgaagctgccggagggaagcacgccgacataactgaaatcgtaaaacgcagcgttttccgcaggataatacacggtgtccggcacgagactctgcttgacctcgaaaagctgtgcaagcttttcggcgcagcggatgcttttttcatcaggctgcacgtgtaaaagggtgatctgctccgcaccgttcgcgcgcagggcggtctcaacggaagcggcatttccgctgcacccgagcaccgcggcggaggtgtttgtgataaccgccgtgcaggcggcgtaatcggtgcggaaaacgacaaggcgtgcggcgctttggttcaaaagcgcgtgtgcacccatgccgcaaagcaggatgcacaccgctaaaacgcatggcagcgctttatttttgcggcggtagagaagcatggaaagcgtgaagaaaaggacgcagatcacgacggttacgggcagatatttgccggagatacgcagcgtaccgggaatgtgctctgcgataagcgtgatgatgaaattctgcgctttcacgcaaatgccgcttaaaaacacgaacggcgcggcgcacggggagaggacggggacggcgagcagcaaggcggcgatgagcccgaaccgcagcagccacgcggaaatctccaacaccaaaagcgatgtgagcaccgaaacgaattgcaccgtgccgtataaataaagctgcagcggcgcagtgaaaagcaccgccgaaagcgagacggaaaatgcagaaacaagctttgcaaggtgcgctttccgctgcggcttgcgaatatttttcgtgactgcttttgtgatgcgcggcgcaagcaggatgatgccgagcgtcgccgaaaacgagaacaacagggagacatcgcccgcgcagaacgggtttaataagctcatggtcaaaacggcgaccgcaagagagttgagcggttccgcctggcgaccgagaagaatgccgaaaagcaaaatgagctgcataatgccgctgcgcaccacagaggccgaaagccccgagacgaacataaaaagcagcgtaaacaccgcggaaacgagcgcggccgggcggcgtttcagtccgagcagacccagaaaaccgagggtgaactgcgttaagatcgccatgtgcatgccggatatggccaaaatgtgcgaagcaccggcctttttgtaggcggagataagctcggtttccatatcgtcccgcaggccgagcagcatggcggaaagcacagagccttcgactttggggtagttttccaaaatcaaattgtgaaaatgcgtgcggatttggtttacataatatgaaaacgggcgcttttcgacaggcgtgacctgcacggattcgtaatccgtgacataggcggataagaccatgttatccgcaagccacgaggtgcgcggggagagcccgagactgtcttcaaacgcgaagaacttcgcttcgcacgtgaccgtgtcgccaatccctgccgggaaagcctcgctgtgggagaggcgtaccgaaaaatcgacatcctgtacgggctcgtcgatgtgcgtcacatgcagcttgtaatagaaccgcccgttgcttttcgtgaggaacgactctacgtttccggtgacggtatatgtgccgccgtcatagcgctctgtgggcagcacgaatagattcattgcaactgcaaacaccgcgaatgcggctgcggtagcgatgagggaaagcacgaaattcggccgttgtcgatgttgcttaaacagaaaaagcagaaaaacggcggcgaacagcaaaaccgccgaaacggcggcaaacggcgcgccgaagaaagaggcgacaaacagcgccgcgaaaaaggggaagccgatgtgcacggccgggcggtcgatgtcgggattctccataaaagctccttacagcaaaattcttacgatatcttcgtagcttgcggcttcaaagttgggcggtatgggaagggtgtttgctttgcgattagggttataccataagctgtctaaaccggcgttctgcgcgcctttgatgtccgccgaaagcgaatcgccgatgacgagacagttttcggtgctcgcgcccggtatgtgcgcaaggacataatcaaaatattttttatccggctttgccgcgccgatctcatcggaaataaagcagcccttcataaaggccgtgacgccggaattcttgaggcgtccgggttgcgagatcgggtttccgtttgtggtgatgtagaggtcgtaacgctctgaaagcgcacgtagcatatctaaagcgcccggcagcggcgtgccggttttcgctatgccggagacatacaggtcttgcaaaaaatcgatgctgaccggtgtgagccccgcggcttcaaagaaatcgacgaagcggttgcggtacagctccgctttggtgcagagcttttgctcaaaacgccgccaccagctttcgttgcagtcgttataaaggcgcagaatctctgcgttgtatggcttttgctttgcaagccccgattgctcgtacatatattgaaatgcgagcggcatgtccttttcaaaatcgatgagcgtctgatcggcatcaaacagcagatttttatattttgtgttcattaaagtctccctcaaagcaaaaaaatccgatagaaaaggacgatgtgcagtacgatgaaaacgggcatggagatcacaaatttcaggtgttttgttttgtggcggatacacagcatggcaataaattcgccgagtgcgccgcctgccgcaccgagcaaaaggagcgtgcgctccgggacacgccattgctttttctgtgcgcggcgcttatcggtaacggtcaggactgcggctgtgatattgatgatacaataataggtcagcagtgtgaactgcacgggttccggtttaaaatccatcatattttcctcgcttgtctcatacttatgattatcttaccgcaaatccgtttggcggtcaagggaacgcagagagaaaggaaaaagcgtatgatcgtaattaaaaagtatcattatgtcatcgcggttttaattctggttgcggccgtatttctggcgatgaaaagcgcggcgggacgggagaaaaacgcagagccgagtgcggcggaaaactccgttgaagtcgtattctcaagcactgcgccggagcaggaggatagcaacgccgcagaaacgaccgcaaaagcagaagaaccgcttgtcggcgtgtggatcccgtacatggcgctcgatgtgacggagaagaccgaagaagcgttcaaggagaattttgatgccaagcttgcggctgcgaaaagcgtcggcgcaaatgcggtgtttgtgcatgtgcggccgtttgcggacagcctgtatccctcggagtacgagtcgtggtcgcaccttttgacgggcatgcaggggaaagaccccggctatgacccgatggaatacatggtaaacgccgcgcacgagcaaaatatgcagtttcacgcgtggatcaacccgctgcgcattgcgagcacgacaatcccgccggagcttgacgaaaatggattttatatgcaaaattatgtaaatcacccgaaatattttatggcgtacaatagcggcatttattataaccccgcaagcgcgtatatccgcaaccgtattgcggacggcgcagcggagatcgccgaaaaatacgacgtggacggcattcattttgacgactatttttaccccacggacgacgaaagcatcgacgccgagcagtacgcggcgtatgtaaaagaaactgaagagccgctcacgctgcatgagtggcgcaccgcgaatgtgaacgcgctcatcgccgccgtgtacagccgcgtgaaggaagcgaatgaaaatgtgcagttcggcatttcgccgcagggcaatttagaaaacaacgagatgatcaatgctgacgtgtacacgtggtgtgcgcaggcggggtatatcgattacgtttgcccgcagctttattacagctttgaaaatgaagcgctgccgtttgaaacggcgctccaaaattggtgcgcattaaagcgcctgccgagcatcaaactgtatatcgggcttgcggtgtacaaggcgggcacggatgcggacaacggcacatggctcaacacgaccgacacgctcgcaaagcagatcgaccgcgcaaaggaagcgggtgcagacggcgtggtgctgtacgccgtagaccacctgacaggcgaaaacgccaaagccgaaatggcgaacgccgtgccggagctggaaaggtttaaagaagcacaacagaattgacaaatcatataaaatattccacaaatcaagagaaaatattgcaccttgtcatcacttttgatatactgaagctgcggctgatgtatgaaaagcggtgcagaatgtgtctgtcccgcattttgcgcctgtcgcacggggcgatattcgaaaacgtccgacctgtttgttttaatgcggaacgaggacggctataaagcctgtgtaacctttatactcggcggctgcggcgcagtttgacggcgcactcagcttatatgcaaaggaatacgaaaaagcggggctcaaaccgaatgtgtttgacagcatagaggcgtttgaaaaaatgtacctcggttgaggtggatttcaaaaggagaacgcctcatcattacgaagcgggtatattatacttcgggggaagaattcacggacatcgagatcaatttgaatacggtcgaggagaccgcagcttcagccgggtgcatcgaaaagtgttgcgcccggttttttgtgcgcgcgtaaactgaattttttgtgaaaaagccgtctttggctttaaaattgaaaaaagctgtgctataatacgaatacgaaagcatatttatgcaactataccttttgaaaattcggttttaaactatttcaggaaggaaaatttcagagatgaataatcatttttttgaacagaaggactgcggcttgcaggcgttctggagcagcacgccgcagtttaaaacggcacgcgtttccgcacaccttgtgctgccgcttaccacgccggaaaatgcggctttatatgcactcgtcccgaatataatctcccgtgcgacgcgcgaataccccgattacacgcagttcggcaagcgccttgcggagctgtacggcgcttcggtgcagccgggtgtaacgcgtgtgggcgataaccagattttaacgcttgccgcagccggcattgcgaacccgtatgcgttcggcggcgaagatgtgcagcaggcgctttccgaaatgctggagagcattctgttcacgccgctgtgcgatgaaaacggtctgttcccggaggacggttttttgcaggaacagcgccagcttttggagacgcttgacgcggaatataacgataaggcgacgtatgccatgcagcgctgtgtgcagaccatgtttgcgggcgaacccgcaggtgtgccgcgcatcggtacgcgcgaggcgatcttgaacgcgacccgcgagggcgtgaaagcggcgtgggagtatgccgtaaagcacgcgcagatctgccagttcacgatcggcgacggtgcggacgaccgctttgcgcagcagcttgtaaagcgcctcggcatgcgcgacgcggtgtccattgaaacaaagcgccacacagcatcgggagacgtaaagcgtgtgacggaagaaatgcccgttgtgcagtctaagctcgtcatgggctttgccatcggcaccacgccggaagagcgccttgcggcaaagctgatgtccgttgtgctcggcggcacaccgagcagcaagctctttatgaacgtgcgcgaaaagcagagcctttgctactactgcgccgcgcgccacgatacgccgaagaacgtcatgctcgtgcagagcggcgtggaaacgaaagacctcgaccgcacggaagaagcgattttaaaagagctcaacgatatgaaaaagggcaatatcacggacgatgagattctctttgcaaagctcgccatgtgcaacagctacaacgccgtggcagattccgcggcatccatggagacatggtatctcagcggcatgctgcagggcaagctccacacgccggaggaatatgcggagtgtatcatgaacatcacgaaggacgagatcgtcagcgccgccgagcgcgccacgctcgatacggtctataagctgaaaggagcggcaaaatgagcgcagaaatgaagaatacccttgtggaaagtaaacttcttcgggacggctaccgctgcgtcaaacacgcaagcggcctgaccgtgtttatatacccgaaagcggaaatgcgcagtacgtatgcggtgtttggcacgcgctacggctccatcgataaggtctttaaacgcagcgacgaggataaggcagagacgacacccgcgggcatcgcgcattttttggagcacaagctttttgaaagcgaagacggcgacgcattcggccgctatgccgagatcggcgcttccgcaaacgcgtatacgtcgtttgagacgacgcgctacctgttctcctgcacggaaaacgcagagcaggcgctggagattttgctcgacttcgtgcagtccccgtattttacaaagcagaccgttgaaaaagagctcggcatcatcggccaggaaatcaaaatgtatgacgatgatccgcagtggcgcatgatgttcagcctgctgcgcgccatgtaccacacgcacccgatcaaggacgacattgcgggcacggtggagagcattgcggaaatcaccccggagtacctttaccgctgctacaacacgttctataacctcaacaacatggcactgtgcgtctgcggcaactgtacggaggaggaagtcctcgcgctgtgcgacaaaatgctgaaaaagagcgagcccgttgaggtggaacgcgtttttgaagaggagcccgataccatcgtgcagccgctcgtcgaagaaaagctgcctgtggcgtgccctatgttccagttcggcgtgaaagaggccgtaaccggtgcgcaccgcacggaaaaagaccttgccgtcaccgaggtgctgctcgacattatggcgtccgacagttcgccgatgttccgcaagctcttagatgcgggccttgtgaacgaagcttccttcagctacgagtattttgagggcacgggctacggtgcgctgctgttcggcggcgaatccggcaacccggaggccgtgtgtgatgccatccgtgaggaaatggcacgtttaaagcgcgaaggtgtcaaggaggaagacgtgcgccgcagcgcgaaatccctttacggcgcgaatgtttccggcctcaatagcccggatgtcatcgcgaacgccgtgatgaccatgcactttaacgaccgcgagctgttccgctacattgagtgcttctccgagatcaccgcggaagacgtgaacgcgcgcattcagacgctgtttgatatggacaaaacggcggcttccatcattcgtccgttggacgaagcttaatcgaaaggatatacagtcatgacgcatcaagttcagttcccgaatctcggaatttcggtggaggtcaatcccatcgcgtttcaggtcggtaatttcaccatttactggtatggcatcatcatcggcatcggtttcctgctggcggtgctgtacggtttttcctcctgcaaaaaaatgaatatcaataaagaccacctgctcgatgccatcatcgccggcttgcttggcggcatcatcggcgcgcgtctttactacgtcatcttctacccgggcgacaagtacatcacgaacccgatggagattttcaacatcaaagagggcggcctcggcatttacggcggcattatcggcggcctgctgtgcggcggcatcgtcgcgaagatccgcaagatgaacctgttcgccgtgctggatgtcgcgtctcttggctatctcatcggtcagggtgtcggtcgctggggtaactttgtgaaccaagaagctttcggctgcgcgaccgacctgccgtggggcatgtacagtgaccgtaccgccgcagaagtggtaggcaatgtgcacccgtgcttcctttacgaatcgattttgtgccttttaggctttgttttactgcatctattcacgcgccacctgcgccggtatgacggccagacgttcttattatacatcatctggtacggcgtgacgcgcttcttcattgaaggtctgcgcacagacagtctgctgttgccgggtatcgatctgcgcgtttcgcaggtgcttgctgcggcttctgcactcgtcgctgttgttttgctcatcgtgttccgcaactgccataagcttacgggctgcggcagccgcaaggcgatggaagctgccggcctgacagttgaagacaaggcggagaaggtcgagattgacgacactgccgaaagcaccattttctccggcatgagcgccgaagaagcacaggagcacatgacagtcggcaccggcgtaaagaaaactgccgaggcggaaaatgaaaaaacggaaggaaatgcggatgcgaacacttccgaagagccgtctgatgaagccgaagaagcgaatgaaacggcagaaggggaaagcgaggagaagaacgatggcagtgagaattgacggcaaggccgttgcggcaaaggtacgcggcgaaattgccgaagaagttgccgctttaaaaaagcagggcgttcagaccggcatggcggtcgtgcttgtcggcgaagaccccgcgtctaaaatttacgtgcgcaacaaaggcaaggcctgcgccgagaccggcatttactccgaggaacacgtcctgccggaaaacaccacgcaggaggagcttttggcgcttatcgaaaagctgaacgcagacccgaagatcaacggcattttggtgcagtctccgctgccgaagcacttgaacgaagcactcatcgtggagcatatcgatccgaaaaaggacgtggacgcgttccacgccgaaaatgtcggccgtatcatgatcggcgatttcgcgtttttgccgtgtacgcccgcgggcatcatcgaactcatccgctctaccggcgtcacaatcgacggcaaaaactgcgtcgtcatcggccgcagcaacatcgtcggcaagccgatggctatgctgcttctgcatgaaaacggcacggtgacgatctgccacagtcacacgaaaaatttaaaagagatctgcaaaacggcggatattctcgttgtcgcggtcggcaaggcgaaatttgtcaccggcgatatggtaaagcccggtgccgtggtgatcgatgtcggcatgaaccgcgatgaaaacggcaagctgtgcggcgatgttgattacgaaagcgccgaggcggtcgccggctaccttacgccggtgcccggcggcgtaggccccatgaccatcacaatgctgatgaaaaacgccgtaacggcagcaaaaatacagaacgggctggtgtaagtatgagcagattgctcagtaaaatcaaggccccgaacgatgtaaaaaagcttgcggcaaacgagctgccggagctttgcgatgagatcagggaagagatcatcagcacggtggcggacaacggcggccacctcgcttccaatttgggcgtggtggagctcactgtggcgctgcaccgtgtgttcaccttgccggaggattgcatcgtgtgggacgtggggcaccaatcctatgcgcacaagcttttaaccggcagagaagaagcgttttccacgctgcgccgcgaggatgggctttcgggctttccgtcgagagaagaaagcgactgcgacccgtttacaacggggcacagcagcgcgtccatttcttcggcgctcggcctttccgttgcaaaggcacttgcgggtgaccccggccatgtcatcgccgtcatcggcgacggcgcgttgaccggcggccttgcgtatgagggcctcaacaatgcgggccgcatcaaccgcaatatgatcgttattttgaatgacaacgccatgtccatttcccgcaacgtgggctccattgcgcgttatctttcctatgtgcgcgcaaagccggggtatttgaacgcaaaagacagcgtcgaagccgcactgtgccgcgtgccgaaggtgggcgagcacatggctgccgaagtgcgccgcgtgaaaaaccaaatcaaaaagaatattttcaacaccacgatctttcaggatcttggctttaattattacggtccgtttgacggacacgacctgcgcaccttgacgtcggttttgacgatggcgcgcgatatggataagccggtgctcatccacatccgcacctataaaggacgcggatataaatacgcggagaacgctccgagcgtttaccacggccttgcggcgtttgaccgcgaaaagggcgcgggcgaagccattgccaagggcttttcgcatgcattcggcgagacgatgtgcacgatagccggtgtaaatgagaagctgtgcgccgttacggcggcgatggaatccggcaccggtctgacggatttccgtgaaaaataccgcagccgtttctttgatgtcggcattgcggaggaacacgccgtcacgttctgcgccggtctggcgcgcggcggcatgattccggtttttgcggtatattccacgtttttacagcgcgcgtacgaccagctcatccacgacggcgccttgcagcatctcaaaattattctggccgtggacagagccggcgtggtcggcgaagacggccagacgcaccaaggcgtgttcgatgccgcgttcctgcgtaccgtgccggacatccacgtgtacgcgccgacgtattacgatgagctttcggacaatcttgatgactgtattaagggagaaaaccacctttatgctattcgctacccgcgcggcaaagagctgtatcgcccggaaaactacacgctttccggcaagccgttttatgtgttcggcacggaagatgcttctgtcacgcttgtgacctacggccgtatgttctcatttgcgtgcgaagcggcggaaacgctcgaaaaagagggcataaagtgccgcatcgtgaagcttaatcgcatcgtgccgatcgatccgaaagcggtggaagcggtcttaaggtgtcccacggtgctgttctttgaagagggcgtccgccaaggcggcatcgcggaggaattcggcgccatgctgttggatcgcaatttcagaggacactacgaagtgcacgctattgaaaacggattcatcaagcacgcgcctatgttccgcacgctgcataagctcggtcttgatgtagagggcatggtgaacgccgtacacacggcgctgcaaatcgcagaaaagaaagatggaaaggcagtttctatatgaaaaaaagggtagacgtcctgctttatgaaaaagggcttgcgcccagccgcgaaaaagcgcgcacgctcatcatggcgggctgtgtttacgcggataaccagaaattcgataagcccggtgacaccgtgcgcgaagacgcagtcttagaggtgcgcggcaacacgctgcgctacgtcagccgcggcggcttaaagcttgaaaaagctatgcagctgtttccgatcaagctcgaaaacaccgtatgtatggacatcggcgcatctacgggcggctttacggactgcatgctgcaaaacggcgcctccaaagtatacagcgtagacgtcggctacgggcagctcgcctggcagctgcgcaccgacccgcgcgtggtgaatctggagcgtacgaacgcccgctatctcacacgcgagcaaattccggaggagattgacttcttctccgtagacgtgtcgttcatctcgctcaaaattattttgcccgccgtgcgtccgcttttaaaggacggcggcaaagccgtgtgccttattaagccgcagtttgaagccggcagggaaaaagtgggcaaaaagggcgttgtgcgcgacaaagccgtgcacgaggaagtggtgcagatgatctgcgattttgcagtggaaaacggatattccgtacagggacttacgttctcgccggtcaaaggaccggagggcaacatcgagtatcttgtgttcctccaaaaaagcgacgcgccggtgaatacggcagaaagcacgccgcacgagatcgtggaagcatctcacgcggcgctggataaaaaggactgaggcttatgaaaattgcggtgattccaaatctggataaacgcgatgcggacacatacacccgggaaattctggcggttttgcaggaaaacggcgcggaaacgctcatgcacgaaaagcatcgcgggcagtatgaacacgtcacgttctgcaaaaatcacgccgcactggcggaaagctgcgaccttatcgttgcggtcggcggcgacggcaccatcatccacacggcaaagcacgcgtccgttgcaggtaagcccatccttggagtgaaccttgggcggctgggctttttggcaggtgtggagaaggacgagctgcacaaattaaaggcgctctttacgggcgattaccgtgtgcgccgcctgatgatgctttccgttaccgtgcacagcgtgaagggggatacaacctaccgcgctttaaacgacgcggtcgtctccggtgcacagtccagaatttacgatttcggcttttccgtcgacggttccaagctttataaattccgcgcggacggcctcattttggctacaccggcgggctccacggcatactcgctctcggcgggcggcccggtggttgacccggaatcggaatgcgtaatcttcacgcccatctgcccgcatgcgctctttaaccgcagcacgctgttctgcgcagataagaccatcacggtcagcacggacagcgattattccggcgaggtgtatctcaccatagacggtggcgcacccatacgcattcataagacggacacggtttccgtcagccgctcgacctattacaccgagcttattcagaccgacgaacgcaatttttacgatattgtagacagcaaatttatgcaaagcagaaattaaaaggcaggaaggaaggcagaaagcatgaaaacaagacgccacgccaaaattctggagctcatcaaagcacaggatatcgacacgcaggaggaactcctgcgcaatctgcgcgcttgtggcttcgacgtaacccaggcaaccgtttcccgcgatatcaaagagcttcggctcgtaaagagtctttccccgaacggaaagtataaatattccaccgggcgcgacaatgcccgcgacatttcctccaagttctattcgctgttcggcgattcggttatgagcgtggaggcggccggcaacatgatcgttgtcaagtgcatgaccggcatggcgcaggcggtttgcgcctctatggatacgctgcattttccggatttcatcggcacgctggccggtgaagacaccattctcatcatctgcaaaacggatgagattgcggaggaaaagcagaacgagctcagaaaactgattggcggggtctgatatgctgacgcagctttacattcagaatatcgccgtcatcgagcaggcatctatcgattttgaaccgggcttcaccgttttgaccggcgagaccggcgcgggcaaatccatcatcatcgacgcaatctacgccgtactcggtgagcgtacctcaaaggagcttgtgcgcacaggtgcggagcaggcgagtgtttcggcactttttacggatatttctccgcagacgcagcaggttttgcgtgagctggatattccgcttgaagacgatggcagtttgcttattcgccgcgagatccgcccgcacgggcgctcctcctgcaagctcaacaatatcccggcgaccgtttccatgctgcgcgccgtcggcggcacgctcatcgatattcttggtcagcatgaaagctacaagttgctttcgccggaagtgcacggcacgtatatcgacagctttgcgggggcatacggtctgcttgcggagtaccgcgcggcgtatacggcgctgcgccgcatcaaaggcgagctcgatgcgctcgaatccgacgaggggcagaagtcccgccgcatggatattttgcgctatcagatcgaagaattagaagctgcacagctgcgcgtcggcgaacaggcagaactgaccgagcgccgtgatgagatccgcaacagtgagcgtatcgtgcgcggtgtgggcgaagccgtcacgcttttgcagggcgatgaggacaatggcggcgccatcacggccgtatccgttgcggcagagtcgctcgagcaggcggcgcgctatgcaccgtcgctttcaaacgtcgccgagcatgtccgcgacgccgaatacgcactgacagatgccgcggcggaaatcttcgattacctcgataacgccatgttcgacgcaaacgagcttgatgagattgaaagccgtctggaagttatctaccgcttgagcctcaaatacggcgaaacggaggaagaaatgctttcgttcctcgaccgtgcccgtgcggagctttcggacatcgaattttccgatgaaaaaaaagaattgcttttgcagcagtatgagcagaagaaaaaagaagcggtgacgcttgcaaagcagctatccgcgaagcgccgcgccgcgtgtgagagcttttcccgccgtgtgcggcaggagctttcagagctcaacatgcccggcgtcgtcttcaccgtggagcaggagcgcacaccgttgacagccttcggctgcgaccgcatccagttcctcgtctccgcaaacgcaggtgaggatccgaagcctatgtcgaagatcgcgtccggcggcgagctttcgcgtattatgctcgccatcaacaccgtgctgtctgaggattccggcgcggccgaaacgcagatcttcgatgagattgacaccggcatcagcggcgaagcggcgaataaggtcggcatcaagctgcgctgcgtctccaaaaacgcgcaggtcatctgcgtcacgcacctggcgcagatcgccgccatggcggataaccacctgtttatcgtcaaaaagcaggagaacaacaaaacgtatacggcggtgcacacgctgacgaaagacgcgcgcgtccgcgagattgcccgtattatcggcggcgatgacatcacgccgttaaaactcaaaatggctgaggagatgctcagtcggccgcatgaatcatgaatgttaaccctgtaaagataaacagcctcacaaccaaaacatgtaaagctatatcacttgtcggtacacttgcgacaatttgcattctgcttttgctttcgccgattctgttcggacagaacgtatttgctgtaaagcaaaccgactgtacagattatcccgtgaattcgcttgcatattacgcatatatgcctgctgaagattatttcccgggtgactgcgcggcgattcaagccgaacgcggtctattgctgctgacgctgaccgaaaacgaccctgaagcccgcgtttggcatacggcgggggactttaaagtctatgccgaagtgccgtatgaatatttagagggcaaagtgagcgcattctgcctgccgcatatgggcttcgtcgcggatgattggcccgttctgttgcctatatttgcagggggcgcggcgcttttctatacattctcgcgcgttctgccgaaaaaactatatcagccaaagtacggcagagagccgggggaggaggccgaaaatggaactgacacctgaatatataaaggctgttcgctttacagttaagcgcggcaacacctacgatgccgccgaggtggatgcgttcttagacgagcttttagaagctgtcaccgcacggcaaaacactccggatgccgatacccttgcagcggtgtgtaccatacgcgccgagatgacggagcagattacccgcgcagtactcgaagccgaaaagcgcattgcacccctgctttcggacgaaaatgcggtttagccgccgattttttcggattttacgctgtttttgtgcacaagtatttgacaagagagcgggatatgttataatataatcgaaatagtgttatgccctttcaaatatgtccgtaggagaacgcaatgaacatcgcacatctgaaatatgcggtggaagtagagaagaccgcatccatcactaaggctgccgaaaacctttttatggggcagccgaacctcagccgcgggattaaggagcttgaggagacgctcggcgtcaagatctttaagcgtacctcaaagggcattgtgcccacaccgcagggagaggagtttctcggctacgccaagagtattctggcacagatcgaagaaatggagtcgctttataagcccgaaaagaataataagctgaagttcagcatctcggtgccgcgcgccagctatattgcggatgcgttttccaagtttgtccgtgaggcggatatgtcaaaggaaatcgagtttagtttcaaagaaacgaacgctatgcgtgccattcgcaacgtggtgcaggaaaactacggccttgccatcgtgcggtatcagacgatctttgagagcttttttacgaacatgctgcgcgataagggcatgaagtcggagaacatctgggaattcgagtatcagcttctcatctccaaaaacgacccgctctcgcaaaagaatgttgtggatatagaagacctttccggctatatcgaaatttgccacggcgatccgttcgtgccgtcgctgccgatgtccgacatcaaaaaggcagagatggacgaaaacgtcaccaaacgcgtgtatgtttacagccgcggcagtcagctcgaccttttggcgacggtgccgcacacatatatgtgggtctcgccgacggatgtggaacaacttgaacgctatgagcttgtgctaaaaccgtgccgcggcaacaaacaccgcgtgtatagagatattttgacgtccaaaaaggaatataaatatacggcggtcgataaacagttcatcgaaaagttgtatgaggagcgcgatttattgagcgcaaagttcggcacgccgcatgcggagtagaaatccgccgaagtttgtatttgatttagtttgtctgttttttaacgtgtcgttggggcttttttgctttcatatcgatgaaattatatcgatatttgaaaatgggtattccatttggtcgtttcttgtgttaaagtattagatgtttggtttattttgattttctgtttggatgggggttggctgcgtcatggtgaatcgcagcatttcaaaacaaacgctgctcaggttaccgctttacctgaattatatgaagcagctcggcgaaaacacgccggaacacatttccgccacgaccatcgcagaggcgctgcgcctcaaccatgtcgttgtgcgcaaagaccttgcagcggtcagttcggccggcaagccgaaggttggttacaacacagaggcgctcatcgcagagcttgaggaattcttaggctacaatgatgttgatgacgccatcatcgtcggcgcgggcaagctcggcaaggcgcttttgacgtatggcggctttaaagactgcggcatgaacattgtggccgcgttcgatatcgatgaagaggtatgtgaggaagattacggcggcaaacgcattctgacaatggataagctgatggatctgtgtgagcgcatgcgcgtgcgcatcggcatcatcgcggtcccggcagaaaatgcgcaggccatctgcaacttgctcattgaaagcggaattctggctatctggaatttcgcgcccgtgcatctcgatgtgccggagggcatattggtacataacgaaaacctcgccgcgtcgcttgcgctcttatctaagcagctcaaggagaaatttgacgccaatacctaagttagcttggcagaaaaggaagatcccttttctatgccattagataaacaaataagtaaaaaccaaaaactaagaaacggagtttgattagaatgaaagttatcatctgcatcggcagctcatgtcatctgaaaggttcccgccaggtcgtggaaaagcttcaggcgctcgtaaaggaaaaccacctcgaagataaggtagaactcggtggcactttctgcatgggtgactgcgtaaacggcgtcaacgtcaccgtagacggcgagaagcattccgtatctcccgacaccaccgaggaattcttccagaaagagattctcgcaaaggttcagtaagcataagaaacaaaaatttagccggtgcaagagcctttttgcatcggctctccgtgcgtaagctgctgtgtgcggcaaaacgcagcagaaaataggaagtaagggtgattaagttgttgacagccggaatgaaaggcaaagccgagaccgttgttacagagaagaacacagccaaagccatgggaagcggcacgctggacgtttttgcaacgcccgctatggtcgcgctgatggaagaggcggcttggaagtgcgttgcgccggaattagagccgggcatgggcactgtgggcacgctgatgaatgtgcagcacacgtccgcaacgccgcttagcatgcatgttacggcagagtgcgaacttaccgaagtggacaaccgccgtttggtgttcacggttaaggcgtttgacgaggtcggccccatcggcagcggtacccatgaaagattcatcgtcaaggatgaaaaattcgtagcgaaagcgaacgctaaaagaggataagttaaagagaggataatagggtatgccagactacctgaagctcaaaaagtctaactgtcagaactgttataagtgcatccgtcattgccctgtcaagtccattcgttttcagtccagtcaggcgcatatcgtaaaagacgagtgcattctctgcggtcagtgctttgtcgtatgtccgcagaacgcaaaagaaatccgaaatgacgtaccgattgcggagatgttcgtcaagggtgaatgtcccgtggcagtcagccttgcgccatcctttgtagcaaattacccgggcgctaccatcgaaacgatgcgtgcggcgctcaaaaagcttggctttgaccgtgtagaggagaccgccgtaggtgcgtccgtcgtcaagaccgaatacgaaaagatcattaaagagcgtcggcagagcgtcatcatttccacatgctgtcactctgtcaatacgcttgtgcagaagtattacccggaggctctgccgtaccttgcacatgttttgtcgccgatgcaggcgcactgtaagatgctgaaggaggaagacccggaactgaagaccgttttcatcgggccgtgcatctccaaaaaggcagaggccgacgaaagcccgtatgtggactgtgtgctcacgttcgaggagctttccgcctggtttgaaaaagaaggcatcaccgtggaagcaggcgaggatcacacggaagaaagccgtgcgcgcctgttcccgacgaccggaggcattctgcgcaccatggtgtgcgatgaccccgagtatacatacatggcgatcgacggcgtggaaaactgcatcaacgcgcttgaagacatcaagagcggtaaaatggagaactgctttgtcgagatgagcgcctgcttcggcagctgcatcaacggcccggctatggatcagggccagcgtcaacctgtgcaggattttatcgcggttaataagtatgccggcaaaaaggactttgtggtgccgcagccggcttccgaagagctcaagcacgattttgattatatcagcctgtatcacctcatgccgggcaacatcgagattgaggctatcctcaaaaagatgggcaagactcgcccggagcaggaattgaactgcggtgcctgcggctataatacctgccgcgaaaaggccatcgctgtttatcagggcaaggcggagatttccatgtgcctgccgtatctgctcggcaaagcgcagtcgttctccgataccatcatcaacaacacgccgaacggcattttggtgctgaacgaatcgctggaaatccagcagatcaacgctgccgcgcgtaagatcgtgaacgtgaagcatacatccgaggtgctcggcaagcaggtcatccgcattctggacccgcgcgtcttcatcgacgtcatgcagtccggccgcggcgtgcgcgacgagcgtgtgtaccttgcggaatacggcaagtatgtcgaccagaccgtgctctacgaccgcaactatcacattatcatgtgcatcatgcgtgatgtgacggatgaaatgaacgaacacctgaaaaaagaaaaaatggggcagcagacgattgaagtcaccaaccgtgtgatcgaaaagcagatgcgcgtcgtacaggagatcgcatcgctgctcggcgagaccacggcagaaacgaaaatcgcgctcaccaagttaaaggaatcgctgcaagatgaataatctctgtacagatattggctggatgagcctcaacaaaaaaggtgaacagctttgcggcgatcacgttgacatcgttccgcagggagaaaattccacggtggttgtgctggcagacggcatgggcagcggcgttaaggcgaacattctttccacgctgaccgcaaagatcatctctaccatgatggcggaggggctgcatgtcgaagactgcgtggagaccattgcgtctacactgcccatctgcgcggtgcgcggcgtggcgtattccacgttcaccatcatccgaatcatagaaaatgaagaagcggagatcattcagtatgataacccgttcgtggttctgctgcgcaacggcaaaaactgggaatacccgcgcgaagccgtcgagatcggcggcaaaacgatctataagacccgcatcccgattcagaaggatgacacgttcatcgcgttcagcgacggcgccattcatgccggcatcggcatgtcgctgaattttggctgggagcgcaaggacatcattgactatatggagatgatgtacgacgaaagcttcacggcaaaaacgctcaatgcgctgctgctcgatgagtgcaacaagctctacggcggccagccgggcgacgataccaccgcggtctgcgtcaaagtgcgcgagcgctgctgcgtgaacctgatgatcggaccgccgtctaaacccgaagatctcgcgaaaatgcacgaggcgttcttctcggcacccggcaagcggattgtctgcggcggtaccacgtctacgcttgcggcggaatacctcaaaaagcccatcatcgcacagctcgattacctcgattccgatattccgcccacggcgaaggtcgaaggactcgaccttgtcaccgaaggcgtcatcaccatgagcaaggtcgtcgagtacgcgaaggattaccttgaggaaaaccgcaagtacagccagtggggctataagcgcgacggcgcgtctatgatcgcccgcatgctgtttgaagaagcgaccgatatcaacttctttgtcggtcgtgcggtaaacccggcgcaccagaacccgaatctgcccattaacttcaacattaagatgcagttggtcgaaaatctctgcacctcgctcgagaagatgggcaaaaaagttaaggtatcttacttctaagcgcagaaaagcttctgcgtatagagtgtctcggcactctaaggaaggtttgaaaatatagaaaaggaagtctctgtccaaagcaagaaaggtttgatgtgaagaatgagaaagtttgatacgaaaatccagtatttgaagtataaggtcctgcgcgaggtcgcacgttacggttttgaggataacctcgacgccgcatactatgagattccgaagctgatcgtcaaagaaaaaccgacgatgcgctgctgcatctacaaagagcgcgccatcgttgaggagcgcatcaagctcgctatgggcggcgacaagaaaaacccgaacgtcatcgaagtcatcgagattgcctgcgacgaatgcccggtcagcggccatgtcgtcacagagtcctgccgcggttgtcttgcacaccgctgcgaggacgtatgccgccgcggcgccatcacgtttgatgagcagcagaaggcgcacatcgataagtcgaaatgcgtagagtgcggccagtgcgcaaaggtatgcccgtacagcgccatcatcaaccagaagcgtccgtgcgaaaaggcctgcaagattaaggccatcagcatgagcagcgaggagcatcgcgcagcgcatattgataacgaaaagtgcatctcctgcggcgcctgtgtctaccagtgcccgttcggcgcaatcgtcgataagtccttcattctcgatgctgtcaaccttatcaagggcagccacgagaatcaggactacaaggtttacgcggtcgtagcaccgtccgtttccagccagttcagctatgcaaagctcggccaggtcatcaccggcattcagcgcctcggcttctatcatgtcatcgaagcggcgctcggcgcagatatggttgcgtataaggaagcggcagagcttgcggaaaagggcttcctcacaagctcctgctgcccggcattcgtttcctacatcaagaagaacttcccgaccatggttgataaaatctcgcacaacctgtctccggcagctgagatcggccgctacatcaaggagaccactccgggcgcaaaggtcgttttcatcgggccgtgcaccgcgaagaagatggagttcaaggaaggcgagccggcaagccgatacattgactgcacgctgacctttgaagagctgcaggcgctgttcgacagccgcaacatcgacctcaccacgctcgaagaaggcgtgctcgacaacgcctcctactacggccgtatctttgcgcgcagcggcggtttgtccgacgcggttgtggaagcgctcaaggagcagaacaacgaagacttcaagctcaacgccatcgcatgcgacggcatcgaagcctgcaaggcggctttgctgcgtgcctccaagaatgttctgccgaacaacttcattgagggcatggcgtgcaccggcggctgcatcggcggcgcaggctgcctgacccacggcgaaaagaacaaggcagatgtcgataagtacggcaagcaggcgatggagaagacaatcctcgacgccatctccgtgaccgatgtcggaccggaagccgaataattaaccgaaatgagatccggtctgctgtgcttgcaggccggattttgttctgttccgaaaaaacgcgtaaactgtacgtggtgctaaacttttaacaaaacattttgcaaagacgcgccgttttccgtgcagatgcagattttttcggtttgccgtgagttttcattgtactttttaaaaaattgcggtataataatacaaatcggcttaaagcgctgcttttggccgtgtgtggtaaaaaacaagacgtatgaggacacacctcactcccggggaaaggaatgctttcatttcagaaagcggtggctgaattatggcacagaatctctctaacgatcatattaacctgaccatgctgacggatttctatgagatcactatggcaaacggctattttgccaacggttttaaggataccatcggctactttgatatgtttttccgcaaagtgccggacggcggcggatttgccattatggcaggcgtggagcagctcgtcaattacttgagtgagctttctttcacgcaggaggatatcgattacctgcgctccaagcacatttttcgcgaagagttcctcgattatctgaagaacttcaagtttacctgcgatgtttgggctgtgccggagggcacgccgatcttcccgggtgagccgatcgtcaccgtgcgcggcccggtcattcaggcacagtttgtggagaccatggttttgctgtccatcaaccaccagagcctcatcgcaacgaagacaaaccgcatcgtgcgcgctgcggacggcagatcggtcatggagttcggctcccgccgtgcacagggctttgacggcgccatttatggcgcacgtgccgcatatatcggcggctgcgtcggcactgcctgcaccatcagcgaccgccgtttcggcgttccggcgctcggcaccatggcacacagctgggtacagctttttgacagcgaatacgaagcatttaaggcgtatgccgaagaatatccgcacaactgcacgctgctcgtcgatacatacaacgtattgaaatccggtgtgccgaacgccatccgcgtctttaacgaagtactcgtgccgcagggcttccgcccggccggcatccgcatcgacagcggcgacatcacgtatctttccagaaaagcgagaaagatgctcgacgacgccggctttgaagactgcaagatctgcgcatccaattctcttgatgagtacatcatccgcgatatgctcatgcagggcgcaaaggttgattccttcggcgtaggcgagcgactcatcacgtcctccagcgagccggtgttcggcggcgtttataagctggcggccgttgaaaagccggacggcaccatcgttccgaagatcaagatcagcgaaaacgtagcaaagatcaccacaccgtgcttcaaggaggtttggcgtatttttgaccgcgagaccgacaaggccattgcggatgtcatcacgctgaacgacgaggtcatcgacgacgagaagccgtatacgatcttcgacccgaaccacacgtggaagcgcaagaccgtggagaatttccgcgccgtgcgcctgcgcacccagctgtttaaaaacggcgagtgcctgtatcagccgcgtgccttaagcgccatccgcgcgcattgcctcgcgcaggtcgatacgctgtgggaagaagtaacgcgatttgaaaacccgcacagctactatgtggacctttcccagaagctgtgggacgagaagaatcgcttgctttccgaaaaccagtattaaaatccaatcatttcacaaattttgcgagtaagccggacagctgcgggtgtacgccgaaaggccgcatctgaggaaagtccgagctccacagggcgagaataacggctaacggccgccgggggcgaccccagggaaagtgcaacagagatataccgcctgcattgcaggtaagggtggaaaggcgcggtaagagcgcaccggcgcgcaggagactgcgcggccatgtaaaccctattcggagcaacatcgtggagaaacatatacgtcggcccggcggtttcgaggagatggcttgagctgcacggcaacgtgcagacgagaaagatggttgtccaagacagaactcggcttataggtttagtcgcaatcttgaataaaaggggacagagagtgcaagctttctgtcccttttacttttaacatcgggagaacggctgcggtcgttctctttttgcgtattcgcgcgctttactgctcgataaagcacagaggcaggacccgagcgatgaggtgaacattcgcatcaatgttgtgcgcttttacggcgaaaaggactgcggactgctcaaacacgcgcctttgggctgattttccggagaatttcaggaaaatagaattttcctcttgcaaaaccgaaaaaactgtggtaggatagtcaaaacaaatttgaaagagaggggtatgacaatgttccgctttgtccgcgttatgatgaatatgcagtccgcaaatgccatgggtaacggtacttgctgcgggcctacattgtcatacgctttttgagagttagaaagaacctaaccgcataaattgcaatgaacagtgcaggctgaatgaacggtctgcactgttttattttcaggagaaatcaggaggaaacacaatggaacacaaggggactgtcacactcgaaacgccaagactcattttacgccgcttaacgcttgcggacgcagagccgatgtaccgcaactgggcgtccgaccctggggtcacaaagttcctcacatggcccacgcacagcagcgtagaggtaacaaagcagatcctcgcgctgtgggcatcgcactatgaggagctcaactattaccagtggggcattgttgtaaaggatgaaaacgcgcttatcggcaccatcactgcggtaaaaacggatgatgagattaaagcggcagagatcggctactgcgtcggccgaaactggtggcacaagggctatacgagcgaagcgctcggcgccgtgatcgattttctgttcgatgaggtcggcctcaaccgcatcgcggcgcgccacgatgtgaacaacccgaactccggcggcgtgatgaaaaagtgcggcatgcagtttgagggcatcatgcgcgagggtgcaaaaaacaatgggggactgtgcgacatcgcaaattatgcgattttgaagaaagatcgcgcataaatcacgttttcggggagaaaattcaaaattttccttgctaaaccgatagcgtttgtagtatgataataaaagtgattatttgcggagaaatgccgcatgccaaagcgtaggttttgcgtgtgcagtttaagtgccgcacggaaaggaatgtggtcatcatgaaaagaacagaaatcgcggccctctacggatcgccggagacctttggcgatacgcaggtcacggtctgtggctgggcgagatcgatccgcgactccaaagcgctcggatttatcgatctgaatgacggcagctgctttaagggcgtacagatcgtctttacggcggaaaaactcgaaaattacaaggagatcgcttcccagaatgtcggcgctgcgctgcgtgtcaccggtacgttgctgctcacgccggaagcgaagcagccttttgaaattcaggcggaggagattaccgttgagggtgcgtcctcgccggaatatccgcttcagaagaagcgccacacggtggaatacctgcgtacggtcgcgcacctgcgcccgagaacgaacctcttcaacgcagcgttccgcgtgcgttccgctgcggcgttcgccatccataagttcttcaacgagaacggcttcacctatgtgcatacgccgattgtcacgggcagtgactgcgagggcgcgggcgagatgttccagctgacaacgctcgacctcgtcaatgttccgaaaaacgaggacggcacggtcgattacagcaaggatttcttcggcaagcagacgtccctcaccgtttccggccagcttgaggcggagtgcatggccatggcgttcggtaaggtctatacgttcggccccacgttccgcgcagagcgctcttatacgcagcgtcacgcggcagagttctggatggtcgagccggagatcgcgtttgccgatctcaacgacgacatggatctcatggaggccatgatcaagtacatcatcaaagacgttatggcgtgctgcccgcaggacatcgacttcttcaaccagtttgtcgataagggcctcaaagagcgtctggagcatgtggcaaactccgatttcgtccgcatttcctatacggatgccgtaaagctccttgaaaagaacaacgacaactttgaatataaggtctcctggggctgcgacctccagaccgagcacgagcgctacctcaccgaaaaagagttcggcaagccggtgttcgtcaccgattacccgaaggagatcaaggcgttctacatgcgcctcaatgacgacaacaaaaccgttgcggcgaccgatctgctcgtgccgggcatcggcgagctgtgcggcgcaagccagagagaagagcgctacgacgtgcttctgaaccgtattcgcgagctcggccttaacgaggaggattactggtggtacctcgaccttcgccgtttcggcggcaacaagcatgcgggcttcggtctcggcttcgagcgcatggtcatgtaccttacgggcatctccaatatccgcgacgtactgccgttcccgcgcacaacgggctctgcggagttctaaatttcataaaagcaagtcttttgccggtacagttcgctgtgccggtttttgctttgttatacacttgtcagaatgaacggaaaagcaggaaaacacgtcgtacaatcgtgcaaaacgggaaaaatgcaagatttataaataaggcttgcatttttagcttatttgtattacaataagaattgtttcaggcgctattggagcgtaaaaatgaattgaatgcttatttttcaattcaaaatcttatttatggagatgttttcgtggcgtacgcaaacttgagcaaagcagaattacagaaggttttcgatgagctttccgcagaatataagggctatcaggccaaaaatctttcgctgaacatggcgcgcggcaagcccagcgcaaaacagctggagctcgccctcggcgttttggaagcgctgaaagcgagaagcgaatttgcgaattccaacggtgatgactgccgtaactacggtctttgggacggtctgccggagatgaaacgcattttcgccgatatggtcggcgtaccggcttcgcaggttattctcggcaacaactcaagcttgatgatgatgtttgaggttatttcccgcggcttctcgcacggctacaacggctgcacgccgtggtgcaagctggataagaaaaagtttctctgtccggtgcctggctacgaccgccattttgccgtaacggagtattacggcttcgagctcatcaacatcccgatgtatgctaccggcccggatatggatctcatcgaaaagctcgtcaaggacgatgactccattaagggcatttggtgtgtgccgaagtattcgaaccccacgggtgtcacgtattccgatgagactgtccgccgtttcgccgcattaaaaccggctgcaaaggacttcaaaatcatgtgggataacgcctattgtgtgcatgacctcaccgatacgccggatacgctgctcaatatctacgatctctgcgttgaaaacggcacagaagatcagatcttcatttttgcctctacgtccaagatctcgttcccgggcgccggtgtggccggcctcgccacgagcgataacaatatccgcgatttcaaggagcacacgctcacgtctaccatcggcccggataagctgaatcagctgcgccacgtgctgttcctgcacgacatcaacggtgtacgcgccctcatgaagggccaccgcgccattttggaaccgaagttccgcctgtgcgagctgatgttggaggaaaatgtcggcgacctcggtgtcgccgagtggaataagccgaacggtggctatttcatcagcgtcgatgtgcttgacggctgcgcaaagcgcgtcgtgcagctgtgtaaagaagcgggcgtcatcctgaccgatgccggtgcgacgttcccgtacggcaaagacccgcacgacagtaacattcgtcttgcgccgtcgttcccgccgcttgaagagctcgaacaagccatggaagttttctgttgctccatcaagcttgccgctgcagaaaagctgctgaacgcgtaaaatttttatacaaaatacagagcaagagagggatagaccgtccttcccttgctcttttgcataaaagcggacatcttttcaaaatcgctttgactccgaacgtaagttttgatgctggcagaagacaaactcgttttgcacgcttgcgccgcttgacgacgtacagccgctgccaaggcgcaggcgctgttcattcataagcacggcaaggaagagtttttcaagctgcaaaacgtcatgcacaaagcgcgtgatttcaagaagatacaggaaatcttgggtcaaaacacgcaggagtgtttgcgcattttagaaggctttatgaaaacggaagcagatgattgacggactttcgatttttgaatgtatttttatcaaaatacaataattttaaaatggtatttttggattttgcttttgcaaatttgcgatttttaatctatattgattctgattttgctgttagtattccggcttttctcaacatgccaatcagcatgaaaaaggtgccggtgtaggggatgagccaaaaattgcggctgataaggctgcaatacacagcgaaaagcatcacggcaggcggggtgcgcgtcattttggcgagcagcttcggctcaataatctgccggatgacgcttagaatgatccacccgatgaagagcccgagtgcttgcgccgcgctgccgcataacaatcggtaaacggcgagcggcagcaaaacggttcccggcccaaagaccgggaaaatatcggagaccgtcacaacggcggcagtcatcagcgggtatttcatgcgcagcaggtggagcatcacaaaactttccgcaaacgtgatggtgtaaatgagtgcataggcggaaacaaacccgacggaagattcgctttttgcggatttttgcaggttttctacgcacttttcaccgatgagcttttttaaaagagacagcaaattttcacggtacagcagggtgagatacgcaaaaaccgggatgagcgtgagcgttaaaaacacggcaggcagcagcaaaatcgcctttacggtaccttgcagcgcgggcatggcggcacccatgttacccgaaaaattcttctgcgcagcggagatccactgcggcaattcctgccatgtgcgctccaaaaacgaccgcacggcgggggcaagtgcttcgtagcgaaagtatcgcccggaagcaaaaaacgcggcgctttcccggatgagccgcgtgaaaagcaatgcaagaaggacgagtgaaacggtataaacggcgacagcagtgcaaagtgcggcgcgcttatgggagagatgcagccgtttttccagcaggcggcatagcggtgttgtgacccatccaagcaacccgccaagcaaaatcgggagaatatgaaaaataaatcgaaccgccaaaacaaagacaactgtatatgatattagtaatatgataaatatcttttggctttttacaaatttccaaatgtgttttgccacctttgcaccgcctttcctttacacatctgcagcgcacatagtttggctttgcgcggcggaaaaattcgcaaatttaagcaaaatatgcatgacatttttcgcgcggtgtgctacaatatcctcgaataaatgtggtgcatgcattttaatgcaccgataacggctaaaggagcttgaatttatggaaattacagtcagcaaacgttttctacgcgtgccggtgaaatttgacggcacttcgcaaaaatttactttttctgaaaacggcacaccggtttataagttcgatgccgtttatacggaagaaaacgcagatgcgatttattatgccgacctgcgcgattaccttggtaagacgatgactgtcacggtggagccggagtgcgcatttacgccggtgtttgaggatgctatgacgccgcttacggcggaagagaccgtcttgcgcccgcagctgcactttacagcggagcgcggctggatcaacgatccgaacggtctgtgcttttacggcggacagtatcaccttttctaccagcacaatccctacggcagactgtggggcaacatgcattggggtcacgccgtgagcccggatcttctccactgggaatataaggaagaagcgatgttccttgacatggacggcgcaatgttttccggctgtgcggtagtcgatcacaacaatgtttccggcctcaaggaaggcgatgaaacgccaatcttgttcttttacacctgcgcgggcgaaaaaaagagcacacagtgccttgcgtacagcacagacggcggtaaaacgctgaaaaagtatgacaaaaatccgctgatcgacgagattgcacccggcaaccgcgacccgaaggttatttacgacgcaaagcgtgcgcgctggctgatggcactgtattttgtggagcgcacctacgcaatcttcacgtcgcaggacttactgcattgggatcttctgcagaaatttgacctgcccggtgatgacgagtgcccggatctctatccgcttacagcagatgacggcagaacgctgtgggtctattccggtgcgcacgacatgtattttgtcggtgattttgatgaaaacggcctttaccagccgattcagtcggtcgggcagctttcgtataactcgcagtcgtatgcggcgcagacgtattactatgagccgggcaagccggtcatccgctttgcgtggaaccgcagcgatattcccggcgcaccgttcaacggctccatgtgtacgccgaccgaaatgacgctgaaaaagcacggcgaccgctactatctctctgcgctgccgatcaagagcacagaaaatctggttgtaaaatctgacaagcttgacgactttacattgacacactgcacgcacgagctcggcagcaagacctgccgcatctcctttactgtaaaggaagggaatcttacatgcagcttgtacggccttgagatgaagctcgacaaaaacggtctgacctgcggagaatccatattgccgcgcctgaaaaacgagccgatgaaggtggatatcattaccgatacaaacagcgtagagatttatttgaacggcgttgcaaacacggtcatcgcgcatgtgctggatgagacaaagccgacgttcacgatccacgccgaggatcccgttgaggtgcagaacctcacagtttccgagctttcgctgtgatgcgtgcaatgaagcgcgtactgaccatcgccgggtcggattgctccggcggcgcgggtattcaggcggatatcaagacaatatccgcacacggcgtgtacgcgatgagcgtgatcgtgtccgttgtggcggaaaacaccgtgcatgtgctgaaaaagcaggatattgcgccggagattgtccgcgcgcaggtggacgcaatctatgaagatatcggtacggacgccgtgaagattggcatgctgccgacgccggaggtgatgtctgctgtggcggaaaagctgcgcaaatactgtccgaagaacgtcgttgttgaccctgtgatgtatgcgaaagacggaacggcactgatggctccgcagtcgattgagacattcaaagcggaaattttgccgctcgccgacgtgctgacaccgaatattcccgaggcggaggaaattaccgggatgcacattgagacggaagacgatatgtgtgctgcagcaaagctgatttacacaatgggctgtaaaactgtgcttgtaaagggaggacactttgcaggcgacccgatcgatattctgttcgatggtgaacagcatataagctttacagcgaaacgcattcaaacgaagaacacgcacggcacagggtgcacgctgtcttccgctattgcctcgaatttggcgcttggatatgcacccgctgaagcggtgaagcgtgcgaaagactacatgacgtgcgccatcgagcacgcgctcgagctcgggcacggcgctgggccgacgaaccacttttacagcttgtatcaaaacggacttccaaagtaaatagcttgctccatagagaaagcaccttgtaaagcttttggccttgcagggtgcttttcatgtttgaaaaatcgcggcggatttgtttatggagcaggcatgtcagttgtttttatattttttcatgagctttcgcagctttaaaccgcagtaggtgagcaaggaaacgtacagaagcatcatggcggtgaagagcacggtgaatgcgatggaagagcggctgtcggtttctatgctgcgcatgaaattcggagacacacagcagatgaaaatgactaaaagcggcagcatacgtgttttcatgatgtggcgaatgaggtcaattttcgattcgttatcggaaaacagctcgccgtcctgctcggtgttttgaacggatgcgggcttgcgaaaatacagccatccgacgcagcggccgatgtactcccagccgtaatccgtgaacagttggaaatagttggcgttttccgcgccgtttttgtaatcgagacgataaatgacatcttcgggtgtacacttttcaaaaatataaaggcacggtgggatcattttgtgcagcttccagccgtttttatgctgctcgtgcagccagatttcttcctcttcataatctgcgatggtgaaaaaacgaatcatggttttggtttcaggcatggatcatttctcctttgctgtttttgtacaggcgctcgatgcgcttgagctcgagctgcaagatttcttcgccgagcgcggtgatgcggtagagcttccgtttttcttcttctttgtaaaaagcgataaggccgtccttttccattttggagagcgtgccgtacatggtgccggcgctgatgacgagcgcgcctccggtcatttcgcgcactttttggctgatgccgtaaccgtgctgaggctgacgcaggcagaataaaatgtaaaagccgctttccgtcatgggaacataaatgcgttttaatttgtcgtccatcgtatccctcactatctgctctcgatatatcaaggttctgtatacaatatatcgaggatcgatgtatttgtcaagaggattttttattttgcagcggttctaaacccggcggcacgtccatagaattgggcatacggagcggaaagaaaggtgtgtgcgatggattttgaaaaggcgatccgcccgctcgggcgctttacaccgatgcttgaaaaggtgccgcaggcggtgcgcgacgcggtgtttgacattcgtatcagtgtggataagcctgtgctgctgtgctgcggcgaccgcattttgtttttgcgggaagacggcgacacggcgcagtatttttcgcaaaacaatgtgacagcgacacgcgaggacgtggaggagatctttttgcggctgtgcgggtattccgtttacagtcacatggaggagattcgcggcggattcgtctccgcagaccgcgcgctgcgggtgggcatcggcggtacggcggtgattgaaaagggcggcatcaaaacggtgcgcgacgtgacgagtctttctgtgcgcatcccgcgggagaagcgcggctgtgcagaggaggtgctgcgctacggcgtagacctcagccgcgggctgctgcttgctggcgcgccgtcctcgggcaaaacgacgctgctgcgggacattgcacgatatatcggtacggcgggacaccgtgtggtggtgcttgacgagcggtttgagctgagtgcggacgggtttgatcttggcgcgtgcacggatattttgcagggctacccgaagcaggaggggctttcgcacgcggtgcggtgtctttcaccggagtacatcgtttgcgatgagctcggcgaaaacgatctttcggcgatacgtgcggcatcgttttcaggggtggcgctgattgcgagcatccacgcgggcagtgtacacgagctgtgttgccgaccgctgtgccgcgggattctgtcgctcggcgcgtttgaaacggtggcgctgctgcacgggcgaagtgcaccgacgaaagtggaaaagctgtttttggcgggtgatcttcttgaaaacaacggcggcgatcctgattgttctgtgcgcggcgaccgccgggtcatcggtatccgcgcggctaaaaatgcgtgaaaaagaactgaacattttcttagaagcgctttttgcgttgaaaaacgccgcggcctatacggcgggcgacctgtacgcgctgctctctctgtgccgcgaaaacgcttttttgaggcgcgtgtgggtgctttccgaaaacatggattgcacagcggcgtttaaagcggcggcacatgcattttttacataccgcggggatgaagcgctgtgcgccgcgtttatcgacgggttcggcaagaccgacctcgatgggcaaatggcgtactttgcgctgcatgaaggccgcgtgcgcagcgcacttttagccgccgagcaaagccttgcccagaaaggcagattgtgcgtggcgctgggactgtttgtcggcgtttccgccgccctcattttgctgtaacagccggaaaggaaagcaaagctatggatgtagatctgatcttcaagatcgccgccatcggcatacttgtggccgttttgaaccagctgctcattcgctccgggcgggaggagcaggctatgatgacgacgcttgcggggctcattgtggtgctgacgatgctcatcacgcagatcagcacgctgttcgatacgatcaaatcggtgtttgggctatgagcacggtgcttatggtatcggcagcggcggtgtttgcagcggtgtgcggcgcacttttaaaacgcgggcaaaaggaaatagctctgctgttttcgcttgcggcggcggtgctcgtttttctgtgtattttgccgcagatcgaaacgctgacttcgacattccgcgaatgggcggagctttccggcatgccggaggtgtttggagcgctgttaaaggcgctcggcatcgtgctcatcgggcgcataacggcggatctttgcaaggacgcgggggaatcggcaatagcaagcggtgtggagcttgccgtaaaaacagcggtgctgctgacggcgctgccgttgctgaatcgacttctctcgcttttgcaggaagtgctgttgttatgaaaaaacggattttgcgcgtttttttggctttgacggtgtttatcctgctgctttcgctgcccgtgcgcgcggacgaagcggagctctaccaaaacagcggagcggatacgcttatggaggcgctgccggaagaagcacagtcgcttttgcagaacgtcggggccgacccgatggaaacacctgcgcccgacgcggcgacaaagctgttttcggcgctttccgagggctttcgtgcggagtggacagcaccggcgcgggcactccttacgctgcttgtatcatgcgtgctgtgcagacttgtgcaggaattcgccgcaaaggagctttcctacgccgtttccgtatgcggggcgctgtgcgccgccgtgacgctgctttcgcctatggcttcgcttttggggcaggccgcgcgtgtgacggatgctgctgccgtttttctgcttgccgcggtgcccgtgtatgcggggctgcttttcacggcggggaacaccgtgacagcaccgacctacggcgcgctgtcgcttgcagcggcaaatgccgtctcggttttgagcagcgcggtgctcatcccggttttgcgtgtgtttttggcgttttccgtggcttctgccgtgacatcgtttgatttaaagcggctgacggacgcgctgtataaagttatcaagtgggctttggtgctcgccgtcacggtatatacgggcgttttgtccgtacagacaattgttgcgaacagcgcggagatggcgggcggcaaggcggcgaaaatgcttgtctccggcgcgatccccattgtgggcagcgcgttttccgatgcgttttcggtcatcgtttccggcgcggcgcttgtaaaaaacggcgtgggtgcatttgggctgcttgcatcgctcgcgatttttctgccgctgtgcataaaggctgccgcgtggcttttgatttgcttttgcgcggggcttgcggcagaggtgttgggtctaaagccgcttgcgtcgtttttaaacggctgtgctgcggcgctgcgactgctcattgcggcggtatgcagtgtgggtgcggtagcggtggtctcggcggccgtggtgctttgtgtgcgaggtgcttatgcgtgaattgtatgcgctggtgttttcggtgtgcgtggtgctcatcggaacggagatgatcgtgcggctgttcccggaaaaaagcgggtcacttatccacgcgcttgcagcgctgatgctgcttgtggtgcttgtaaacggcattttaaagctgcaaagcggggcctcgctcgattttgacttgaccgaaacgggcgaagccgaatcgacgataacgcaaagctacgcggaaaagggcacggcgattttgaaagagcggctctcggcgcttttgaaaagtgcggggatggatgtgccggcagcgaatatcgacatttggtacacgcaggacgatgacggcgtggtgacggtggaacgtgtgcgggtacgggtgcggtttgcgacagacatcgaccgcgcggacgcgcttttgcgcagcgtgctgaccgaggccatcccggtggatgtgtacgtgtaggaggtgaggcgagacggataaactgaaaagccttttgaaaaacggtaagctgacgtatatgctcattgcagcctgcgcggcgctcgttttattgatgctcctttggcctatggacacaaagaacacggaaaatgaagcgccggagacggtggaactggcggcgggagactacaccagagcgctttccgcgcagatcgcgcagatggtctcggctatcacgggggaaagcgagccgcaggtgacggtgacgctgcgtacaatgggcgaaacggtgtatgcgaccgaagataagcagagcgaaaaaagcgccgaggagtacagcggcgaaagcctcaaccgcacgcagacggacggcgacacgcagaagacgtatatcctggtgaaggcggcggacggctcgcagaagccgctcatcgtgacgaaaacggagccggagatccgaggcgtggtagtcgtgagtcgcgggggaggcgacccgaaaatgcgggagaagattgtggaggccgtgaagactgcgctcgatttatcctcaacgcaggtatgcgtggtggggtacagcgaatatacatatggcaacgaatgaaaccattcagtgaagatcggaggaacacggaatgaaatacggtaaaagacagctgatcttggcatcacttgtgctggcccttggtgcggcggtgtacttaaattggcagtttgcgggcacaaaggtgcagagcgcgggcgatgtcagcgaggaaagtgcgtcttccgctctcggtgcggcgcagcttgtgaacaacgcctatgtggagacggtctccgacacgcctatgaacgaggacggcgttctgccggaaacggagcccgcagacggtgcggcggaaagcagcgcggcagaagaaacagcggctgcggtatcggcttccgcaaagctttcggacgcccgcttgacgcgccagaccgcacgggatgaggctgtggagctgctggaggacatcctgaaagacgacagcgccgaggtcgccgtaaagcaggccgccgtggacgaagctgcggttatcgcgcagaacattttgaaagagacaaacatagagtccctcatagaagcgaagggctttacggagtgcgtggcgtacatcaacggcgagagctgcacggtggttgtaaacggcgacatggaggacgaacagaacgcgctcatcgtgcgggacattgcagtttccgaaagcggcgtcagcgcggaaaacgtgaaaatcatttctgcggcgaaataaaagatgatttcttgcattttaccgtttatcgtggtatactattccagaacatatcggcgtgtatgtctggagcttgaaaactgcacatcaaacggcaccggtgaaaaccgaaagtgcctgatttctgctcaaattgcctgccgatctttcggcgggcttttttgtttatatccgccatgaatcacgcaatgaattttattgagataagggaaaggaaccgagtatgacgaaaagaagagaatcgagagaacaggcttttacgctgctttttgaaaagaccgtgacgggcgacagcatggaagacatcattgaaatggcgaaggaagcgcgcgacgtcgttatcgatccgtactgcgaaaagctgaccgctttgacggagctttatttagacgagatcgaccacacgatcgaagaaaatctgcgcggctggagtttgcgccgtctttctaaaatgacgctgacgattttgcgcgttgccgtgtgcgagatgcagtttatgcaggccgacgatgttccggtgagcgtttccatcaacgaggcggtggagcttgcaaaaatttacggcaacgaaaaggacgcttcttacgtaaacggcgtactttccacgattgcaaagaagcttgagggagcgaagaacgagacggagagcgaaaatgcctaacatcagcgtgctcggtttagacaccagcaattacacaacgagcgccgcgtttttttgtgacggcgaaatggacagccgcggcatgattttgcctgtgaaggagggcgagatcggattgcgccagagtgacgcggtgtttcaccacacgcgccagctgccggaggtgctgtccatgctcggtgataagatcggcggggcgaaggtcattggcgtttcggagcgtccgcgtgatgcgaaggactcctatatgccgtgcttcttggtgggcatcggcgcggcgcagatgcttgcgcaggcgttaggggtgccgctgcggcgcttttcgcaccagcaggggcacattgcggcggcgctttactctgcccaacgactggacttgctgcacgagcgctttttggcgtttcacatgtccggcggcacaacggaagcggttttggtagaacctgtggagggtgacaaaatgtttcgcacgcgtcttgttgcgtcttcactcgatttaaaggccgggcaggtcattgaccgcatcggcgtgatgctcggtctgccgtttccggctggcaagcatttagaccccattgcgtgcaattatacggaaagactgcgcgtgcgcgcttcgatgaaaggcgcgaactgctcgctttccggtgtggaaaacaagtgccgcgagctgatgaaaaagggcgcgccgaaggaggaaatcgccgcgacgtgcatggcgtacgtcattgcggcatcggacgcgatgtgtaaggcgcttatcgagacattcggcgatttgcccgtggtgttttcgggcggcgtgtcttcaaactccatgctgcgcgcgcacatgagtgaaaagtacggcgcactgtttgcggagccgcgtttttcggcggataacgctgccggcatcgccgttttggcgtcactttcgcaggaggcctgatatgcgcgttttatcggtttcgcagatcaacttttttataaagtcgcttattgagggtgacggccgcatgcgcgacatttacgcgcgcggcgaaatttccaattttaccgatcactaccgctccggacatctgtatttttcgctgaaagacgaaaagtccgttttgaaggcggtcatgttttcgtctgccgcgcggcggctgcgtttttgcccgaaagagggcatgcgcgttatcgtgcgcgggcgtgtggccgtgtatgagcccggcgggcagtaccaattctatgtggaggaaatgcagccggacggcgtgggcgcgctgagcttagcgtttgagcagctgaaagaaaagcttgctgccgaggggctgttcgcggaagaacacaagcggccgatcccgccgtttccggcgcgcatcggcgttattacatcgccgacgggtgcggcggtgcaggatattcgcaacatactctcgcggcgctggcctgcggcggagatcgtgttttgcccggtgcttgtgcagggcgaggacgcagcggcgcagcttacggcggcggtgaaattgatgaacgcccaaaaggcggcggatgtcatcatcatcgggcgcggcggcggctccgcggaggatttggccgcattcaacgacgagacgctcgcaagggcagtgttcgcgtcgaagatacccgtcatctccgctgtggggcacgagacggattttacgatttgcgattttgtcgcggacttgagagcgccaacgccgagcgcggcggcagagcttgccgtgccggacagggaagaaatgcgtgcggcacttgcgcagctgacgcgccgtttgtgcggcagcgtgcaggcggggcttgacgatcggcggcagatgctcgatgcgcttgcaagcgcaaacgtgctgcaaaacccgtccgcgtggctttcaccgcgcaggcaggcgctccgaaacacggtgcagagcctgacgcacagcgccgagcgaagaattttgaatgagaaaaacgagcttgctgcgctttccgcacggttagacgcaatgagcccgctgaaggtgctttcacgcggatacgcgatcgtgtccgacgaaaacgggaaagtgataaagcgcacggaagacgcaaagccgggcgacgttttgacagcgtgtgtagaggacggcgcgatcaccgtgcgggtgcagaaaacagaaaagagggaaatgaccgatgcctaaaaaaaccatgacctttgaagacgcgatgctgcgccttcgcgaggtgaccgagacgctcgaaaagggagatgtgacactggaagaatctgtgaagctttttagcgagggcgcggagctttcccgcttttgctatgagaaattaaacactgccgaacagaaaattacggagctgagtgctgcgaaaacggaggaataaaaatggaagacagggtaaaacgcattgaaaaagacttagatcattttttgccggagcgcaagggctcgctttccgagaccgtgaccgacgccatgcgctattcgcttttaaacggcggcaagcgtgtgcgcgctgttttaacgctttcgttctgcgagctgtgcggcggcgatgaagacatggcgatgccgtttgcgtgtgccgtggagatggtacatgcgtattcgctcatccacgatgacctgccgtgcatggataacgacgatatgcgccgcggtaagccctctaaccacaaggtctacggtgaaaattacgcattgcttgcgggcgacggccttttgacaaaagcatttgaaacggcgctgagcagtgaagcattccgaaatgtcggcatggagcgcgctgcgtatgcggcggcggtgcttgcgcgctgcgcgggcgagcacggtatggtgggtggccagtgcattgaccttgcaaccgaaaaccgcaccgtttcgctcgatgagctgtgcgaaaaagacaccggcaagaccgcaaacctcatcatggcggcatgcatgatgggctgcattgcggcgggtgcgaacgaaacgcagatcaatgcagcaaaggaatacgcgctgcacatcggtttggcgttccagatccgcgacgatattctggacgtgaccggtgacgccaaggagcttggcaagaacatcggcgtggatgcacaaaacgcgcgctgcacgtatgtttccattttgggcgtggaaaaagcgcaggcgcttgtcgatgagcataccgaaaaggcacttcatgcgcttgacgcgtttgacgcggacagcacgttcctgcacgagtttgcggaaaagctcgcgacgcgcagcaagtaatgaaacgcacactggagttcgtcatcgactgcggacaggaaaacatggacgtgcgcacgttcgtgcggcggtacttagggttttccgcacgcattttaacggcgctgaaatacgagggagagatgcttaaaaacggcgaacccgtgcacagcaatgccgttttgaaagccggcgatacgctgactttgacgctgcttgagacgggcgaagcgtatgaaaaagccgatctgccgtttgcggttttatatgaggacgaggattttttagtgctcgataagccgtacaatatgcccgtgcacccttcgccggggcacgaccgcgacagcgttttaaatgcggcggcgtggtattttcaaaatacgccggactttgtgtttcggccgctgtaccgcttagaccgggatacgaccggcgcactggtgctggcgaaaaacaaatttgccgcaaacgcaaagctgacgaaaacgtaccgcgccgtgtgcgagggcgaaacgcccgaaagcgggtgtgtgaatgtgcccatcgggttaaagccggggcataaggtggaacgctgcgcgggcatcggagacgaagccgtgacggaatttcaaacagtgaaaacgagcggcgggtccagccttgttgatttccatttgaaaaccgggcgcacgcaccagattcgcgtgcacatggcgcaccttgggcatcccgtggcgggggacgacctttacggcgggcatttggacagaacggagcaccagatgctctgctgccgtgcagtgcatcttttatgtccggcgctcgacatcgataaaacggtcgagacggatttttcggcggaacaaaaggcgtgtttcccggagctttttcaatgaaaaacaccccgcagctttaaaactgcggggtagtccatatcaagtgaaattttattccacgtccgtatggatgaggcggtctaacagtgtgatgagtaaaatgcgctcttcatcggaaaggtcgcgcgtgacgcttttggcccaatcccgcaaaatctcgcggatgacgggcacgagtttttcgccgctttccgtgacgtagaggttgttttcgcggcgatcttccttgccggtttcgcgcgaaatgtagccgagctcttcaaggcgttttgtgcggcgtgctacggtgcatttgtcgatatacatgtgtgagacaatggcgtcctgcgtggtgccggggtggcggttgatgtaaagcaggatcatcggcatgccacctacaaagccgtagccgcgcagacggtcatccatatattttttacgctggcggtgcagataggtgaagctgcggcttagatcacgcggaaaatccgcaaggcgctcctgttcggtttctgctgttttctgttcttccggcatgcttacacctccgtatggtttatggctttattatatggcttatgtgcgaaaaagtcaattcaaaaatccgcttattccgcgataaacgggtgacagacgcgcttatacagttcgtcgtcgaacataacgtgataaatgttttcgagctcatgcagcacgactttcgcttccggcacgggctgcgcgatgggcagcacgagtatgttgaaatccacgccgtacaaaaggcttttggcttttgtcatttcgcacccgcagcgctcataaaacgcgatgcggcggcgacggatgttgacttcttcttcggcttcggcgctctcaacgctttccacttcgagcaaaagaccgtcacggtctttcatttctgtgcgcagcaggggaaaagtcttgctgccgatgcccgtgccgcgcaggtcttttttgacggcgaaataatcgagcagggcgtatttgccgttttccgtgcacgaaaaataggcataggcgcagagtgaatcggtctcgtcgtaaaagccgtagcatgggtagcagtttttattgtagagcatttccatgcttgcaaaagggcgcagctcgctcggcgggaatgcctcgtgcatatatgcgttgtaaatttcgcgaatttcgtctaaattcagctttttaatgtgtaacaaatactcaactcccatttttattttggaccaagcaaaggagctttactttgaatccatttccgtatacgtttgataacaaacggtatcatacattagcttatcacaaccgggtgcagaattgcaagacccaaaaggcggtgatcgatgccgggctgaactgcccgaacatagacggcacgtgcggcgtgggcgggtgcatcttctgcgacggcggcagcggctattttacgcaggataaggcattttccgtgacggagcagctgcaagcggaaaaagtgcgtattcataaaaagtcgccggaaagtaaaatcatcgcgtattttcagacgcacacaaacacctacgcgccggttgaaaagctcaggacgttatacgaagaagcgcttgcattcggcgtttacggcgtatcgattgccacgcgcccggactgcatcggggaggctgttttgtcgcttttaaaagaattgaacggcaaaacgcacctcaccgtggaactgggcctgcaaagcagtaatgatgagacggctgcgcgtattcacagaggatataaatacgagatatttagagagatatttctgcgcctgcgtgaaaacaatattcgcgtttgcgtgcatatcatagacggcttaccgggcgagacggaggcggagatgataaagaccgctgaagaccttgcacagctgcgcccggacggtgtgaaaattcatcttttgcacgtcattcgcggcacgcagcttgcgggtttatacgaaagcggcgcatacacgacgatgacgtttgaggactatgtgcgcgtcgtaatccgtcaactggaggtgctgccgcccgaaacggtcatcgagcgcattacgggcgacggtgacaaaacaaagctgcttgcgcccctgtggagccgcgataaaatccgcgtactcggcacgatagaccgcgagatggcagtgggaaatacttggcaaggcagactttattcgccgaatggcttgcaaaaaggacagaaaatgcgtataatagaataaatccgaacacggtgtgcagtttacgctgtgatttcgtttatgaaaggtaattttactatgaataataaagctccaaataaacatagcgacgcgcgttcttttgaaatgcgccgtttgattttccttggcgcggccggcgtgctcattctggtcgtggtcattttatcgctcctatccgcgttcggcgggaaatccgacggtcagagcaccggcaacggcacgtcttccgcggtgacggaggacggcaagcttgtcattcaggatctttacgagggtgagatcaccattccgaagtttaatgtgccgctcaatacatacgaccagtcgaagtttaaaaatgacaacggccttgtgacgtatgacgacgcgaacgcgagcctcggtatcgacgtttccgactatcagggcgatatcgactgggcagccgtcaaagcgagcggcatcgatttcgcgatgatccgcgcaggctaccgcggtgcaacgcgcggcaagctgaacgaagacagcaagtttgccgataattacaccggtgcgaaggacgcaggcgtaaaggtgggcatctacttcttctcgcaggcaacttctgttaccgaagcggaggaggaagcgggctatgtgctccagcttttgcagaataagtccgtcgattaccccgtcgtctttgactgggagcagacgagcgtagacggctctcgcacggcagatgccacgggcgagcagattacgagttatgcttcggcgttctgcaaaaaaatcgcgaaagcgggctacaccgcaggtgtgtacttcaaccgcagtcttggctataactattatgacttagagcagctcaaggactttgagttctggcttgcggaataccgcagcgtgccggcgttctactataacttcggcctgtggcagtattccgacaacgcgcaggtgcagggcatcgacgcggcagtcgatattaacgtcagctttaagaactacggctgattttaaaagtaaaaacgaaaggtgcttgatcattttggtcaggcacctttttgttattcttcgttttcgccgaaccagccgcaggctttcatgtctacgcggccgtcgggcaggaactgcacgccctcggcttcgagcttttcgcgctgtacatcggggccgccgaaaacgtagcccttgcacagagagccgtctttgaacactacgcggtggcatggcgtatttacggggtccgtgttgcggtgcagcacaaagcccacgccgcgcgaggcccgcgggttgcccgccgcaaatgccacgaagccgtaatttgtcaccttgccgcgcgggatctcgcgcaccacctgaaacacgcgctcggaaaaatcgttcatcgtattcaacttcctttgctttcaaaccgttttgtacagtatagcataaaagtagtctttacaaaagggtttttattgattataatgaaatataacgaaaccaaaattgaaacggagttgttgatatggctattattgaagtgaattttatctcgaagtgcctcatgcgcgtggtgacgttcaatgcgattatcccggtggataagttcggcccgcaggcggaaaacgcagagcagaagccgctgaagacgctttaccttttgcacggtattttcggcaattatacggactgggtgaacggcacgcgcattcaggcgtgggcagaggcaaacgaccttgcggtcattatgccctccggtgaaaaccgcttctacctcgacgacgaaaagagcggcgagctgtacggcgagttcatcggcaaggagcttgtagagttcacaagaaagctgtttccgctttccgacaagcgcgaggatacgttcattgcgggtctttccatgggcggctacggtgcaatccgcaacggcctgaagtatgcggaaaactttggctgtgtcatcggtctttccgccgcgctcgtgcacgatacgtggaaggacgcggacaactccgcgccgatcttcacattccgccgcaactattacgagtcaattttcggtgaatatgacaaggtgaagggcagcgacaaagacccgaaggcgctgcttttgaagctgaaggaggagggcagacccgtaccgaaaatgtacctgtgctgcggcacggaggacggcctcgtcaccgcaaaccgcgatttccgtgatttcctcaacgaaaacggtgttgacctcacgtatgtggagggccccggcaagcacgactgggtattctgggatacgtacatcaaaaaggtgctcgactggctgccgcttaatagaacaggcgcgggcatcaacagcggaaacgtgaaataaagcaaaacagaaaacaggggaacggatgatgcagaagagaaatctgaaaaattccgcaagatcacgatgaatgtgctaacgatgcagctcaattccatcacgatcatggatctcatcgccgccagcttgcaaattcgtaaacataaagtaaaagccatcgaaacggtgaagcgcaaggcttgccgcaaacggtggcttttactctatgaaaatttaattctgcgttttattgccgggcaggatattgaggttttccgggacgtttgggtgggggatgttgtgcaacgcaaagcccgcaagctgacggatgatctgcaaaacgaacgaccgcgtttcggggtcgaggtgcacggcggcgttgtagatagcgccgatgttcttttgaatgtcgccagcgtcaaatacgttttcaatattgccggcggtcaaaaggccgtagagtacatcgacaaggcgtatgcgctcgtcgatgctcatgccggtgatccagctgttgagtgtttggttcatgtattttgcgccgctggaaatttcctccagcgtatggaatgcaccgtccgtcacctgccacgagaacgggtcgtgctgcataatgcccatttggttgctttccacaacggagtatgcaccgtgattttcaagcagcatgccgatgagcgagcctttcggaatgactttatgtacgcggctttgaatgcgcccatattcttcggattcgagcgtgttgccgatgaaaccggggctgtcgagcgggtagacgcgctcaatacgcttttgaatttccgggtcgcagaacatgcccgcgtaggctgcaaggttgccgcctttggagtggcccatcaaaagcagtttgccgggaaaaccttcgccgagctttgtcacatagtctgccgcatcggcctgcgaggggatgacgggcagaaatgccatgttaaaatcctctttccagccgacaagcgtggcgtccgtgccgcggaatacggcgcaggcgtggtcgtcatcgaggtatacagtgatggccgcaaactgctcctctgactggtcacacagcttttcaacgaagttgccgatttttatgttgcgccagcgcgggcttgacgccatagcgtacaaaagcctcatgttgcttttggtatcgcgtacgtggaacatcaacttttcaaagcgctctgcctttaaaagctctcgaatttctattttgttttcgcatttaagctcgtcttcaaacgcgctcagattcatgtaggaaaactgtgataaaagcaggctgtctacatccgtaaacggtttttctgccaaaggcgagaattcggtttctgcatattcaaggatgcttggcatagtacgccgcctttctgagaaagttaaacgtaataatagggaccgggcttacagaggatgacgatgagatcgacgaacgcgccgatgccgaacaggccgccggtgaagatatacaaaacacccatgccaatctttccctcataaaatttatgcgcgccgatgagtcctaaaaacaggcacaggaaaaacgctgcccatttgctttttgccacaccaccgtaagtgacattgttgtttacataaacaggctggggctgttgggcagactgcaatggctctacctgcctgccgcatgcggggcaaaccacgcagtcggcaccgatgaccgcgccgcagtatttacagaatttcgcgttttcggtgcacgtgccgcagtttgggcaaaaaagctcaccgttcggaatatttgcaccgcaatttttgcagaccataagaaaatctcctttgtatatttgaatgtttgtccaccgaaatcataacacagattttgacattccgcaacgtgtttcaccgctttttctgattgccgcgcacaaaagcagcgcgtctgtcatagtatgccgcgggacaaagcgctgtgcatgtcccaatatgcagggaaggagggtaaaggtttgatgaaacagacggttttaaagacgacggtggccgtgctcggcgcgggacttgtgtcgtacctcggtacgcttgcggtgccgatgctcgtgctgctcggcgtgatgttgctcgattatatcaccggcatgatcaaagcgtatatccgcgccgagttaaattccaagttcggtattaaggggatactcaaaaagctttgctatatggtcatggtcgcagtcggtgcggcggtggattatcttttgcgcggtgcagtcatcggggccggcatcacgctcgatgtaaagctgtttttcggcatgctcgtcaccgtgtggcttacgatcaacgagctcatttccgtcatggaaaatcttgcggccatcggcgtgccggggtttccgcgtttgcagcgcattttaaggcggctccgtcgcaccgtggcggatgaatcgggtgcaagtgatgggaagaaggagtgatcttatggtaccgatccgcgaaaatctattatcttctgcaaaatacgatttgaaagtgccggtggagtcctgcgctaaggacatgaagtacattgtcgtccacaacacggcaaacgatgcttccgccgcaaatgaagtcgcgtatatgattcgcaacgacagctctacgtcgtttaacgcggcggtcgatgacaaagagattgtcatcggcataccgctcgacaagggcgcattcgcagcgggccaacgtgatggcaatgcacatggtattcatatcgagatttgctattcgctttcgggcggcacgcgtttcgataaagccgagaagaacgcggcggagtatatcgcaaagctgctcaccgagcgcaaatgggatatttcgcatgtgaagaagcatcaggacttcgacggcaaatattgcccgcatagaacgctcgacaagggctgggcgcggttttttaaaatgattgaaagcgaaatgaaggacgacaaaaaggagacaaagactggtgcgaaacccgtgccaaagcagctttaccgcgtgcggacaagctggtcggacgcaaaaagccagatcggcgcgtatgcaatgctggaaaatgcgaaaaacgcatgccctgtgggttataaagtgtatgcctcaaatggcaaaattatgtatgaaccgttcaaagcgtatacagtgcgcaaggacgctgcagatgcgctcaatatccgcaagggtccgggtacgaattatgacgtgcaggggcagatcacagacacgaagcgctatacggttgtagaggagagcgcaggtgtgggttctgcaaaaggctggggacgtctcaaagccggcggctgggtcgcactcgactgggtgaaaaaagcgcagcgccgatgataaggcataatataaacagaaaacgcaaaatgaatttgtgaaagcaagatattgcatttttgcggcccatgtggtatgctaaacgtattgatgcagcacgccggtgaaactgaagggggaaaacggtttcaccggcggctgtgtttgaatattcgcagaaaataggtggagaagtaatgaagaaacatcacagtaatcgcagcatgttctcgggtaaactcgggttcgtgctgtctgcggccggcgcttcggtcggtcttggcaacatttggcgatttccgtaccttgcggcaaaatacggcggcggcattttccttttgatctacattttgcttgcgctgacgttcggttacacgatgatcgtggcagaaacatcgcttggccgcatgacgcgcaaaagccctgtgggtgcatatgcatcgttcacaaagtcgcatacattaaaagccggcggctggattaacgccattatcccaatcctgattgtgccttattattccgttatcggcggctgggtcatcaaatatctttttgagtacatttgcggcaacggaacaaagcttgcggaggatggatatttttcgatgttcatctcggacggcgtgtccgccgaaatttgctttatcgtttttgcactcatcacgctgaccatcatttttgccggcgtgcgcaacggtattgagcgtgtatcgaaattcatgatgccgatccttgtcgtgttgtctgtcatcatcgcaatctattccgtcacacgtcccggcgcactgaagggtattcagtatttccttgtgccgaaccttgagaatttctcctggatgacggtcgtttccgccatgggacagatgttctattcgctgtccatcgccatgggcatccttgttacgtttggctcttatatgaaaaaagaaacgtccattgaggactctacacgcaatgtggagattttcgacaccgccattgccattatggccggccttatgatcatcccggcggtctttgcgttctccagcggcgacccgaacaccttgcaggcgggcccgtcattgatgttcatcacgattccgaaggtgttcgccagcatgggcctcggcacggtggttggcattctgttcttcgtgctcgtgctgtttgcggcggtcacaagctctattgcgctgacggaaagcgccgtttccacgtttgaagatgaactccattggaaccgcaaaaagtcgaccgttgttatcggcatcatcatgctcgtgctcggcacgctgtcttcgctcggctacggcccgcttgatgccgtaaagattctcggcatgcagttcctcgatttcttcgatttcttaacgaactccgttatgatgccgattgcggctattgcgacttgcctgctcgtttcccgcgtgatcggtgtagaccgtattgaagaagaaatgacgcaagaaggcggcacgttccgcagaaagaagatcttcgtcatgatgatcaagtatctttgcccggtctttgcagccatcatccttatcagctctgtcatgaacgcattcggcctgatctctatgtaagcattttgaccggcgcgacgaaagccgcgtgcttcgatgatgccgcaaggtgtcattttaccggacgaaagaaataacaaaatagaatgagcgaggccccggcgagcgttttgtcatgctcgccggggcctgtgtctgttgtgcgttatttcagaactttttcgtaggcaaagcggtctgcgccgtccgtaaggtgaatgatgccgcagcgaatgtaaccgttcttttcgagcgtgtgctgcatgatgatgttgccgggatgcgtatcgcatcgcatggaggtgacacccgcttcaagcgagagtttcgcgcagtaggtcatcaaaaacgatgctgcgccgcggttcttggcgctttttgccgccataatgcggtgcacgatgccgtagattttgttttctgtctgccacgcgccgttataaatttcgtggtatgtcggctcgtcgcccacatacacggcggcacttgcaagaatattgttttcgtcgtctatcacaacacggcagattctattttgaatgtcctcacgcagggtggtttcgttcgggtagccgttttgccactggtcgatgccgagcgcccgcagcgaagctttcgcgttttctagcatctcaagcagatagggcaggtcacagagctctgcatttctgatcttcattttctttcatcctttcccgttttgccgcgcagaatctgcaaaaaatcccatgtgcgcgttacaaatatgaacatatacaaaattatacgattttttgcttgccttttcaagggaaaacgtgtataatactaaagtacgcggtcaagtatgttccgcgcacggaaaaagccaaggcggttggaatataccgtggaatatgcgagcggacaggtctgcgcggcgagacaccgtgaaccatgtcaggcgggggaccgagcagcattaagcggatcgtctggtgcgatgcaggctgcctgtccgttcacatattctacgttccaagcgtctttttcttttatcactcacaaagaaaggagcgccgccgtttgtataaagcgttatacagaaaatatcgtccgcagcagttttccgatgtcgtcggtcagccgcaggtgacggtcacgttaaaaaacgaactgatggccgggcgcatttcgcacgcatatctgttcaccggctcgcgcggcacgggaaaaacgacctgcgcaaaaattctggcgaaggcggtcaattgcatggatccccaaaacggcgatccatgcggcaagtgcgacgtgtgcagaggactggatgacggctctgttttggacgttgtagagctggacgccgcgagcaacaacggcgtagacagcatccgtgcgctcattgaagaatccaacttcacgccgactacggcgaaataccgcgtatatatcatcgatgaggtgcacatgctttccgtttcggcgttcaatgccctcttaaaaacgctcgaagaacctcccgcacacgtcattttcattttggcgacgaccgaagtccataagctgttgccgacgattttatcgcgctgtcagcgttttgatttccgccgcatcgcaccggaggacatcgcagggcgccttgagtgggtctgcacgcaggaaaatgtgacaatcgaccacgatgccgcgatgctcatcgccgttacggcagacggcggcatgcgcgacgcgctttccattttggatcagtgcatcggtcgcagcgacgggcacgtgacgtatgggctcgttgcggaaacggcgggccttgcggggcgtgggcacttaattgaactcgccgagtgcattcgcacgggcgaccgcaccgcggcactcgaaaagatcaacgcgctgtataagtcttccaaagacatgggcaggctgtgcgaggagcttgcgggcttttttcgcaatttgatgctcatcaaaacgatgaaggacgcaagcgggcttgtaaatgccgttggcgaagagctggaagccatgaccaaaacggcgctttccatggagctttcaacgattctgcacgcgctcgatgcgttccagtccgcgcagtcgcgcatgaagaccatgaataagcgcacggaaatggaaatgacgtttatccgtctttgcacgccggaaatggatacctcgcccgcagcactcttgcgccgcattgaagttttggagcgcggcggcctgcgccgtcccatcaccccggcaccgagtgtatccgcggctgaagcaccggcagcaccggtacaacagcccgagacaccacagaacaacgcacctgtgcagcccgcggtaaaggacaagccgcagtccacagaggagcttgcaaaaaatgcgcagccgttcgacggctggtcggacattatcggctatatggaaaattactcaaagtcggtggcgtcggcgttcaagggctcagcggcgtacatcagcggcgactacatgctcatcgaagcgccgcagattgcgtttgatctcttgaaacgtgccagccagagagaaaagatccgcgaggccattcagcaggtgaccgggcgggtgtataaactcggcccttataagccgcccgcagcggacggcgaaaaaccgaaagatccgctcgacgcctttttgcacgatatgcgcgaagccggcgtggagatcgaagaaaaataaatttaaaaaccacacagtaaggagtcttaactatgaaagcacgtttaccgcagggtatgggcggcggcggagccgcaaatttgcagcagcttgcacgccaggcacagaagatgcaggagcagatggagcagattaccacggagctcgaggcgaaggaatacaccgcggccgcaggcggcggagccgtttccgcaaccgtaacgggcaaaatggaagtgaagaacatcgacattaagccggaagtcatcgaccccgatgatgccgaaatgctcggcgacctcgtcgctgctgctgtcaacgaagcgctgcgcgcagccgcaaacgagaaagaggagaagcttggcgcaatctccggcggcatgagccttccgggcatcctctaatggccggttatcacgtaccgccgctcgaacggctcgtcgataaatttgagagcctgccgggcgtggggcataagtccgcacagcgcattgcgtatgccgtgctcaacatggataaagcggatgccgaaagctttgcgcaggcgatcatcgacgcgcacgagcagatccattactgctccgtgtgctgcaatttgacggacggcgacctttgccccgtgtgccgcgatgaaagccgagaccgctcggttatctgcgtggtggaagacccacgcgacgtgttcgcactggaacgcacaaatgagttccacgcgacctaccacgtgctgcacggtgccatttcgccgcttggcggcatcgggccggatcagctcaaaataaaagagcttttgcgtcgcgtgcaggacggcaccgtgcaggaggtcatcatggcgacgaacccgaccgttgagggcgaagcgaccgccatgtacatttcgcgcctgttaaagccgctcggtatccgcgtaacgcgtcttgcgtacggcatcccggtcggcggcgacctcgaatatgccgatgaagtgacgctttctcgcgccattgagggcagacaggagctgtaaaatcgatttcgcgttgacaaaaccgcgaaagtggtgtatagtaaatcacacacaaagcagaagggggcaggccaagtggcaaaaacagaatttaaaacgattgcccagaacaaaaaggcctaccacgactactttgtggaggagacccttgaagcgggcattgagctttgcggcacagaggtgaaatcgctgcggcagggcagatgcaacttaaaggacgcgtggtgctctgttgtggacggtgaaatgctcttaaacggctgccatatcagcccgtatgagcagggcaacatctttaaccgtgaccccatgcgggtgcgccgtttgctcatgcacaagcgcgagatcatgcggctttttggcctttccaaaaccgtcggttattcgctcattccgctttccgtgtactttaagggttcgcgggtgaaggtgcaggtcggtctgtgcaagggcaaaaagctctacgataagcgtgccgatatggccgcgcgtgatgcccaacgcgatattcagcgtgcgctgaaagagaaaaacagataaaagcggtagcaatatcgctttttatatggggatgtaaaggtttcgacggggactggaagccctggtaagcgagtagcggtgcgggaccgctataaaatccgcaaacttaaaattaaacgacaacaatacagttgctgttgctgcttaattaagcagccgttcttacccgtagaaccgcggacgggataagagcgtcacttagcggtgcacgtgaacgggcccacgcctttaagtccgtcatgatctaaaggctactgatgcgcaaagcctgctgttcggcggtgcgcggagggaatgtcaaaagagccgctacactcgtagaaagccccggtaaccggttttcggacgcgggttcgattcccgccatctccaccagaaaaaaggtctttgtcatttttgacaaagacctttttcagtgaaatttgccttgcggcgagtgaaataataacctgcggttattgtaaaattgcttcgcagtgaaatgcactgcgcgcgttaagggcgaatttaataacaactgcaagttgttttcacattgcgatgaaggagcagtatttcacttgacagttattaggtggatttactataatgaatttaagattaaagtcgcattttagatagtacttgcatgtggaaaggagatatggtgatgaaacagtggccatatcattttcaaagctctatgtcgaatgtattggtgatcgttgcagctttaatggcgattttccttgtgatttatggtttataccgaatattgcgtaacccttttcattatccatattttgtgcgttcttttgatgtatctcggaagagaaatgtagacattgaagattatatagataaatatttgtgtagtgaatttggctggaattgtatagtggaacaccataatacgatcataaattggaagaaaagaacggagagttacattcaaacttgtatattgaaaaagaggcgtactcgccagctttatgaaatcatagatgacaattttgcttttcgctttaaaacggttagagatcaaacaagatacagacagcaaaattacgtgaagacatcctataaagtgtccgtgcttgattctgaaatagctgttgattgggactggcttgtacaacgtcatagaaaattagagagaatagggtttgaagcgacactgaaagaataccatagtcgagatcagcggcgacagatgacaaaagagttacgccaacagatcatgaaacgggatcactatacatgtcaaaattgcggaaagtacatgccggatggagtaggactccaaatcgaccatattattccgatttcaaaaggcggaaaaacggttgcgtctaatttgcaggtgctgtgttcaaaatgtaatggcagaaaggggaatagaagaacgacataaagaaagaacacaaatcgtgagcagttagtttaaaacgatttgtgttcttttgctttttaattaaaatataagcttttttagctctcctcaaccatcgctctcaaaagttcaatttcggctttgtagccggggagttcgtttggagtttcgagataaaaggggaggcggcgcaggacagggtggttgatgatgcggcggaacgcttccgtgccaatcttgccctcgccgatctttgcgtggcggtctttgtgagaggaaagcccgaagatgctgtcgttaatgtgtaccgctttcagacggttaagcccaatcacgcggtcaaactccgtcaacacaccgtcgaggtcgtttacaatgtcatacccggcatcgaacacgtggcaggtatcgaggcacacgcccatgaggtcggagagcgttacgcggtccagaatttcacggagttcctcaaaatgagagccgacttccgtgcccttgcctgccatggtctcgagtaaaaccgtggtggtctgttcgggagataaaatggcgttcagcgtttcgctgatctgtgtgacgccggtctcgatgccttgtccaacgtggctgccggggtggaagttatagagattgtgcggtgtggcttccagacgcttcaaatcatcctgcatcgtttcgcgggcaaatgtgcgggtgtcttcgtttgcggagcagggattgatcgtatacggcgcgtgggcgagcagcacggcaaagtggttttccgccgctaactcgtttaacttctgtgcatcgttcagatcaagcggctttgcacggctgccgcgcgggtttcgcgtgaagaactggaacgtatccgcgccgatggaaagtgccgttttgcccatggcgtagtagcccttagaggcagaaagatgacaaccgatgtgcagcatggcttattccttggagttccagtttttgtagatctcttttgtggaacgcaccatttcctgcgcaaaatcggaaacatatttgcggttatagaacgccttcgtgcggtcgtttggcatcatttcgagcagctcttcttcagaaagttcacgataccggttctcaaacacgatggagctctttgcaaaacgagttgtctgctttctttccttttgctgctgggtgggatagccgaagaccagcatgcaaagcggcgcgacctgcgggggcaggtttaaaagctctttgtgaatctcgaagttctccacaatatcgccgatatagcaggaaccgatgccgaggctttccgcggcgatgcaggctgtgtgtgcggcgatgacggcatcttccgttgcaagcaccatgttgctgagctccggcgcgggaatgttttcgcagcccgccattttgaactttctgtaccaacggtggtaatctgcacagaaaatgagcaccattttcgcctgtgcaatgaacggctgatgatcacaggtttcggcaagcttatccttaatggactgatccgtcacgtcgatgatggagtacggcatgcagttgccgccggtcggtgcgcgcatggcagcggcaaggataatatctttgatttcgggtgagatctccttatcctcaaaaacacggacggacttgcggttcatcaaaacttgaatcgtttcattcattttttagaccccttccaaattgttgtaattaagctgctaacagtatagcacaataaagcatctgtgtaaagaaaaatatagagccgaagtgcacgggaaaacggtactatgggttgacaaatttaacagcggggttataataatatcaaagaggcgtatgaggagtgcggctatggaattgcatgaactgatgggaaaattacataagctggagcttgtgcaacagcttgcgcatcggcgtggggcgcaggagcatggtctgtatttcggccagatgcctgtgctggatttcattgcggcaaatcccgggtgtacacaggtgcaggtggcagaccatctgcgtgtcagcccggcctccattgcgctctctacaaagcgtttgcagaaggcggggtatctcacaaaagaagtggatgccgaaaacttacgctgcaagcggctttatatctcagaagaagggcaaagggcctgtgccatgtgccgcgagcggttagaccagatcgacgcggtggcgtttcagggcttttcggaagaagagcttgaagtgttttcctcttttttggatcgcgtgacgctcaacatgacgggcgagagcgagaatgttgtgagcggcgaattgttcggccatttgtgccgggagctcgatgccattgaaaaagaggcgaagaaaagctgattttctggtaaggttgtgttttttaccatctgatttgcaaaaaatatcaaatacattcctgcgttctttcattataataagggcgtaaacacagaggcgataccacaatgccggtcaatcgggcaaaatttcacttcgataatacatacgccggtatggatatgctgtacgggccatatgttctgtatcagatcggggacttaagctgcgaagcaggttaccagacctttgagcacgaacaggcggtctacgaaatcacgtacgtgctttccggcaccggtgcattttatgtagatgatacggtgtacaccatgcagaagggtgacctgctccttgtgcgcaagggacagatgcacaacatcatctcggcggagatcgaaccgctgcgtttcttttatctcggctttgattttgtagagccgatcgtaaatgagaagattgcacagcttaagagctttttcgatacgaacgagcaggtgcagtttcataacgcggtcagcttacaggacacgttcatgcgcgtgctttccgaattcatttcggacgacgtactctcgaaccttttgattgaagcgtacatgcaggagatcatctgcggcgtataccgcattttcagccgaaagttctacaaaaactacttactgagcggcagcaataattccgatgaaaagctcgtctacgatgtcatcaattacattgatgtgcaccttgagtccatggaaaatctcagcgcgctcagtgcggagtttgggtacagttatacccatattgcgcagaagttctctgcgtttacgggcgaaagcctgaaatcctatcacacgaagcggcgctttgaaaagtcaaacgagtatcttcgccagggatattccgttacaaaagtcgccgagctgatgggcttcaaatcgatccatgcgttcagccgcgcctacaaaaaatatgtgggcatggcgccgcgtgaatataaaaaatgggccgaggaggataaaaagaaccttccgcagcccgcagaaaattcttaaaggagttgtattccaatgaaagttgccgttattggttgcggtacgatcgcaaatgcagcgcacatcccgtcttacatgaacaacccggaggcagaaatcaagtatttctgcgacatcatcccggagcgcgcacaggctgccgttgaaaagtacggctgcggcaccgctgttgtggattatcacgatgtcctggcagacccggaagttgaagctgtttccgtctgcaccccgaacaatgttcacccgaccatttccattgacgcattgcgcgcaggcaagaatgttctgtgcgagaagccggctgcaagaacctacaaggaagcccttgagatgcagaaggttcagcacgagaccggcaaagtgctcaacatcggcgttgtcaaccgcttcaatgacagcgtgaacctcatcaaaaagtatatcgacgacggcaagctcggcaatatctaccatgtacatgccagcttccgtgcacaccgctccattccgggcctcggcggcgcgttcaccacaaaggcgattgcaggtggcggtgctctgattgactggggtgtgcattaccttgatatcgttatgtactgctgcggtgacccgaaggttaagaccgttacgggtgaagccttctgcgagcttggcaaggacatgaagggctacgcatacaccgacatgtgggcaggtcccccgaagtacgacggcacctacgacgtggacgactccgttgtcggcatgatccgtaccgaaggcccggtcatctctctgcacggcgcttgggcgcagaacatcggcgaaaacgagtgttacatcgacttcatgggcgataagggtggcatccgtctccagtacggcaaggatttcaccgtttacagctccgagtacggtgcactcacggagtataagcctgtctttaagatgcgcgaccacttccagaacgagattgacgcattcattgactgcatcaagaccggcaagaagctgccgtctcacatcgataccgttatcatcacggcacagatgatgcaggcgatttacgattcctccgagcagcacaaagagatcacgctgggctaaactccctgtgcattaagaaaggaaattgcttatgtatcccttttctatcggcgttctgatggacggcttccgcaccgatacgctcacggctctcgataaagctgttgcagtcggcgcgaccggcattcaggtttacgcaacaagaggcgaaatgtcgcccgagaatatgaacgcagaagcacgccgcgaatttttgaagcgcgtgaaggatcacggcctgacgatctctgcgctgtgcggcgacctcggccacggcttcaacgacccgaagctgaacccggagctcattgaaaaatccaaacgcatcgtagaccttgcaaaggacctcgagaccgatgtgatcacaacgcatatcggcgttgtaccgaacgacccgagccacccgcgctatgcaatcatgcaggatgcttgcggccagcttgcggcgtatgcagactccatgcaggcacacttcgctgtggagaccggcccggagattgcaacgacgctgaaggggttccttgacggcctccattccaagggtgtttccgtcaaccttgatccggcaaactttgttatggtcacgggcgacgacccggtgcaggcggtctacacgctgaaggattacattgtgcacacacatgcaaaagacggcaagcgtctgcattatgtcagcccggagatcctgtacggcatggaggaatccgacatgctgaacgacgcttccttcattgagcttccgctcggcgaaggcgacgtagatttcccggcgtacttcaaggcgctgaacgacatcggctataagggcttcctgacgatcgaacgtgaagtcggcgacgaccccgagggcgatatccgcaaggcggcagattacatccgcagcctgatttgattttaaaaagcacagaaggagaacggtttcggccgctctcctttttgcatcataactttttgctgcgtctgacgcatggcccaacggtgttttacgtgtatgccgcaacggttgaaagtgcggatatcccaatcacgctgcaggcgaatgaaacgatcgattacaaatttctgccgtatgacaaattctgcgatttcgtacagtccgtggcgtttgccgcttcccttcgggaacgttttccggcgtatcaaaacgcgctcgaaacatatgtaaagcaagttttgaaagacgcaacttgcaaaaaatgacggggggaaaatcaattattcatttgtatgctttcctgttgaattttggtgtttgctgtgttaaaatctcaaacggattaaaaacaggcgcttcgcctgtaatgaggaaagttggcgcagtatgaataacccgattcaaaatgttaaggaaaagcttacaaaacagaatttaaagacgtttatgctcatcacgttcggcacctttgtttttgccatcggcacttatttctttaaatttccgaataatttttccaccggcggcgtgagcggtatctctattctgctcggtcatatttttccgtcgttctccacagcgggtatcatgtggattatcaatatcatcttgctcatcgtcggttttatcattttgggacgcggtttcggtgtgcttaccgtgtattgtagcatgctgctttcgtttttgacgtggctgcttgaaaagctcgttccgctttctaagccgcttaccgaccagccgttcctcgagctgtgctacggtatgatgctgccggcggtcggctcggcgatcctctttaactgcaacgcttcgagcggcggcacggatattgttgcgatgatcctcaaaaagtacacgagtcttgatatcggcaaagcgctgctcgtcagcgatacgctcatcgcgttttccgcgatgtttgtattcgatatccgcacaggcctgttttcgctgctcggtcttgctatcaaggcgttcatggtcgattccgtgattgaaggtattaacctctgcaaatatttctccattgtcaccacgcacccggaggagatttgcgattacatcattcacaagatgaaccgcagttcgaccattgtggatgccacaggcgcgtattcgcatgagggttgcaaggtcgtcatggttgcgtgcagacgcggtgaagctgtgaagctccgcgcgtatgtccgttccgtcgataaaaaggcatttatgttcatcacgaatacgagcgagatcatcggcaagggcttccgttctgttgaatgaccgtacataaaagtttttggcagcgcatcgtttcggtgtgctgcttttttacaggcgaaaatttaatttagtattgacttaattaaaattcgtgctataatttaatttagcaaatacttaatcaggaggacgctatggggtcaacagctatgatgttcaaagcactggcagatgaaaaccgccttttgctgctgcgccttttgctgcgccgcaactgttgcgtgcgcgcactggcaagacagctggatatttcggaagcggcggtttcacagcatttaaaagttctgcgtgaagcggggctcattttcggcgaaaagtgcggttatttcatgcactataccgtcaatcgcgcggcgcttaaagaactcagcagccagctctctcgcatggcgttttccgcagagcagttgccctgcacaccgcagcatggcgggtgcagccgtgcggaatatgacaaatgccgaaacgcggcgcagccgcaggcggagcatattctgcacgtagcagaaaatagaatatttgattcgaaaggaagcatgaacatgaaaatcgcggtaacgtatcagaacggactggttttccagcatttcggccattccgaagcgtttaagatctatgagattgagaacggcgaagttaaaaatgcagaggtcgcgcccacaaatggcagcggccacggtgcactggctggctttttgaagcagcacggcgtgaatgcgctcatctgcggcggcatcggcggcggtgcgcgcacggcgcttgcagaagcgggcatcgagttgtatcccggtgtttccggcagcgcggacgcggcggttaattcgctgctgaacggcacactgctctataacccggataccgtctgtgcacaccatcaccacgagggcggtcatgactgcggcagccatagctgcggggaagataagcacggctgcgtgggcaatcattgatttaccggaagggtcatttcggcatttgctgcgatgacctttctttttctttacaaaccgcgaaactgtttgaaaacacgtgatttctgtgttatactatacgcagagtttgaaatttatctacgggaggacaagcatgtcgaatccgtacagagaggaatttatctccatttatacacagaacatcacgcgcgagggctcgcagaagcttttggcgtggctggataccaccgatttttacaccgcgccggcaagcacaaagttccactgtgcctgcgaaagcggccttgtgatgcacagcctgaatgtctacaaggcgatgcgcgagcgttggtttgacgagggcgacagtgaagaaagctttgcgatatgtgcgctgctgcacgacgtgtgcaaatcgcagttttataagacctccacgcgcaacgtgaaaaatgacgagaccgggcagtgggagaagcgtccgttttacacggtggacgatgcattcccgttcggtcacggtgaaaaatccgtttacctcatcgagcgttttatgcgtctaaagcctgtggaagccatggcaatccgctggcacatgggtggctttgacgacgcggcgaagggcggcagctttgccatcagcctggcatttgaccgctatccgctcgctgtgaagctgcacatggctgatttggaatcaacctatctgcgcgaaaaaggcacctccgatgtgcgctgagaggcggtgagcagatgatcgcgatacaaactgcaaatttaacgaaaaaatacggcgacatcattgcgataaatggcgtggaccttgaagtggaagccggggagatcgtcggctgcctcggcccggagagatccggcaaaacgacgctgctgcgccttttaacgggtcttgtgcgcccgacgctcggcgacagcacagtgctgggactttcttctgtaaaagagagtcgcaaactgcgcgcgaaaagcggtatcgttaccgatacggcggcctgtattggaagcatgagcgctctggaaaacctgctgatgttcgcttccatgtatggcatgcgcaaggagcaagcccgtacacatgcggcgcagcttttgaagaagcttgacctttggaacgcgcgcgaccgcaaggtctacacgttttccacagagatgtgccgccggctatcgctggcgcgtgcgcttgtgcatcgcccgcagatcgtgttttcggacggtttgcccggcggcgagcaagcggtatcggacgcaatggtgctgcgcacactttcggattacgcaaaggaaaccggcgccacggtgctgctttgcaccgatcatcttgaaagcgcggaggaaatctgcacaagctttgcggtgctggagcacggctttttacgggcgagcggcgacctttcgatgcttacggccgcttctgaattgacgcctatggcggtgatccgcgtgagcgacacgcagaagatgccggaggacttcacactgcatgatggcgcgtgggaaaaaccaatcaaatccgaagccgatatgccggagcttatttccgggcttgtgcgggagaatgtcggcatttacgaagcatccgtgtgtacgcccacattgcaggatgtttattacgcgtttgtgaaaaagccgggagaggagacaccgcatgaagaagctgttttataagctgttttccaaagcggaacgtgcactcatgatgaaggacctttccgctttgtgccgccgcaggctgatcttgacgttgctcatcgcactgccgctcgtttttgcggtggcgttcccacttttgttcctgttcgtttccgctatggtttcaccggaatcctccggtgtggagcagtttaaaaacctgctcgataacattccgcaggggacggacgagcgcgcgcagatgttctacattttcacggcgtttatctcgccgatgctgtttatgctcattccgcttttatcggcaatcattacggcttcgtacacgtttgcgggcgagcgggcacacggcacaatggaaacgcttctgtttgcgccgttcagcgtgcgccgctttttgcaggtgaaggcggcaagcagtgttttggcttccgggcttgtcacggcggtttcgtttattctgttctttgtcgccacggctatcggcgatacggttttgaaagcaccgtttttctttgacctttcatggttcgttctggtgtttttgctctcgccggccatcacggtgctgggcgttacgtttgctgcgatgctgaccgtgaaagcacgctccacagcggaatccattcaaatttccggctatatcgtgctgccgattttgctcattttcatcgggcagattatgggcctgtatcgcttgaacagtattgcacttttggttttgacagcgatcatcgttgggatcgacctgtgtttattcaacttcgggttccggcgcttcacagccgaaaagctgctgacgcgtccgccggaaaagccgcgaaaggagaaaaccaatgtctattgacctgcactgccacacaagatattcggacggctccacgccgcttgaggagcttatacagcttgctgcgctccgcggcgtgacgacgttcgcgctcaccgaccacgataccatggcgggctgcgaatgcgcgttggagcttgggcggggagcgggcgtgacggtgattcccggcgtggaaatttctgctgcagacccgaagcgtcacggcaaagcgcatatcctgtgctataagccgaagaagcccgaagtgttgctgccgctgctgcaaaaaacgacggacagccgccatgcggcgatgctacgctccgttgataaagtctgccgcctgtatgcgattccgcgcgagatgattctgcgccgcgcggagggctcgacgaatatctacaagcagcacgttttgcaggcgttaatggacgccggctacgcgagtgagatgttcggcgaggtttttaagaagctctatgattccaaaacgggcatcgcctacgagaaggtggattatcccgacatcgataccgtgatggatgcggttgacgccgcagagggcatcgcggtcttggcgcacccgagcgaataccacagcatggatcttctgcgcgagctgtgcagaaaccaccgcatccgcggcattgaagtttatcatccgcgcaacacggaggaggataaagcggaaatgttgcgcttagctgaaaagtatgaccttgccgtcaccggcggcacggattatcacggcttttacacgacaaagaaaaatccggtcggcacgttcacgacggccgaatccgaatttgataaattattttctgaatgaaagggaaatgcaaaatgaagtatgatttcacaccgaaaggtgtatgttccagaggcattcatgtagagctcgacggcgacgttatccgctccgtgaaattcgatggcggctgtaacggcaatacgcagggcgtggcagcgcttgcggtcggtatgaccgttgacgaatacgtaaagcgctgcaagggcatcaagtgcggctttaagaacacctcctgcccggatcagctcgcgctcgcactggaagaagcgctcgcagagcagaagaaggcataagtaatttgctcaagagaaattacccggagagaaactctttccgggtttttctctgtttgggcttgatttttcctcagaatacggtataatagtttagtcaacaaaatatgcgggtatggcggaattggcagacgcgccagatttaggttctggtacttcggtgtgcaggttcaagtcctgttacccgcaccataagtccgccgtaattttgatagaattacggcggactttttgtcatcttgctaagtgctttattaaatgatataatgagggcaataaattgtagtttaattaatcaccaaacttaaaggagtgaataaaaataaattgaccgaatatgagaaattttgggatgaaatgtccaaaacggaagaagttgattatgacgatgaaatgataaatcgtcttttgaggctcaaggcaattcaaagccatttatcaggggttcataaaattttggatgtaggagcagcaacaggagcttattccatacctttggctagaatgggctttgatgtagtacatttggatttatctgatgaaatgattaaggcggcaaaagataaagcgataggtttaacaaacattcagtttattaagcacaatgcttgttgtctggatgtattcgagaataatgaatttgaccttgtgttatgttttgacggggcaatttcattctctggaagcaaggcagaagatgtaattgctgaaatatgcagagtcggaaaaaaggtaatgctttcggtttctagcaaaagttgtatgacagtcacatggctgaactatagtcttagtaaactgcactacattcacccgtccgtaaaggacataatggaaacaggttgctttaacaaagagaactacgacaatgctgaggaacttacatccattgctgaattaaaagcctatgatattgatgaattaagggatgttttgaacaaaaacgggatgaatgttttggaatgtcgcagcattggtagtctaacgcatctgtatttgttgcatctttatcggcagaattccgctcaagaagtgcataagaaaatcaatgaaatcagtatggacaagaaatttcttgaaatctgcgattattacgacaaatatgttatgccaaacggtatgggcagtttcagacgtgcgggtatatttgcgatagcagaaaaaccgtaagcaaaaagttggtttacgagtgtgtcctcaataatgtttcactttaaattgagtacaagtctgttccaccactcacaacaaccacacgcggctgttatctgtcgcagccaaaacaatccggtgaattgttttggcgttgcgatacaatgaggcaacgacagttgcccataacctaattcaaagtcacaggttcgacccctgctacccgcaccataaaaacgagtgtattcagaggctttggcttttgtgttcactcgttttaatatgccatatatatgacacgatcggccgaacggcgaagcgaaaatcagagaatactatgaaatggcacagggtatcgttgaagctatcaatcaaaaatcgaacgcccaagaaatctggaacgaggtatataaagatctcgttgagccgtgtgtaaacatgattcatcacaataaaaatgaaagtgcttatacgctttataaactttattctctgaaattgaatcaaaaatacaaagcataagaatcgaaaacagaaggtcaagccggataagagacttgaccttctgttttcgtatttatagttgcctaaaaattatttcgcgttggccgcttcttcgatggcttccaaaacggtgtcgtagtccgcttccgtgacgaggagggagatctcgacttcggaagtcgtgatgaggcggatgtcggcgtcgcttgcggcgatggcgctgaacactctggctgccatgcccggcgtgtttttcatctgcgggtcatagacggagattttatggttcacgctgctgacgataaccttgatgccggtctcggtcttgagcgtattcgcaaaagacagcacttcgatgaggtcttggtcagaaatggtaaaagaaaggccggcatttgcaccgtggttcgggggcatggagatcatatcgatgttgatatcgagctccgcgatgcgctcgaatacctcagccataaagcctgtggtggcggggctgccttgcagggtgaccagtgtgatattgctgaccgtgctgatttcggttgtgcccatgatctgttccatcctttcttaaaccaaagcggacatgtcgtaaaggccggggcctttgccgctcatgaataccgctgcgtttactgcgcccaccgcgaacagctctttggactgcgcagaatgggagagcgtgatgacctcgttgttgcccgcaaagatcacttcatgctcgccgacaatggtgccgccgcgcacggagtgaatgccaatctcgctcttttcgcgctttttgcgctgtgcgtggcgatcgtacatatactgcgtttcgccgtcgcgcacggaagcaagcgcatcggcaagcatcaaagccgtgccgctcggcgcatcaatcttctgattgtggtgcttttcgacgatctcaatgtcgaactggtcgccgagcacctttgccgccttttttgcaagctccagcatcaggttaatgccgagtgacatgttgcgggaatagaagattggctgcgtttcggaagctttggtaagctccgcggtctgctctgctgtgtagcccgtggtgcagagtacggccggaatgccgcccttttccgccgcgtagtgcaaaatcggcgtcaaaagggaggggtgggagaagtcgatgataacatctgccgcttccgctacctgatcgatggaggtgtaagcggggtaggaagcagtctgtgcattgacgttcagatcaacgccggcaacaatctcgcaatcggtgcgttcggaaacaagctgcgtgatgaagtgacccattttgccgcagcagccacataaaataatccttgtcattttacgtccgttcctttcttttaatcaggcgagctgcagatgctttgccatttcggccttcagctttgcaatctgctcatcggacatatcgacaagcggcaagcggcagtggccgcagttgaagcccatcaggttcaatgcctgctttaccgggattgggttgacgtccatgaacagtgcgttcatgaggtcgagatacttaaacgtgagtgcctgcgccgtcttgaggtcgcccgcaacagaagcggtggcaagctcgtgcatttctttcggcatgatgttggagaatgtagagatgacgcccttgccgccgagagacgcaatcggcaaagtctgcgtgtcttcaccggagtaaaccgtgaggtcatcaccgcaaagctcacgcgttttgatgagcgcggagatgtcgtggttcgcttcctttgtggcaacgatgttctgcgtcttcgagagctcgtagtacgtttccggcagaatgttgaggccggtgcggctcgggacattatacacaatgcacggaatttttacactgcctgcgatgcggttgaagcttgcaacgaggccgcgctgggaagtcttgttgtagtacggcgtgacaagcagaaggccgtttgcgccgagtgcttctgctttttgggagagctccacggcgtaggcggtatcattgctgccggtgcctgcgatgaccggcacgcggccggcaaccttgtttacggtgaactcgatgaccttcacgtgctcttcatcggtgagcgttgccgcttcgccggtggtaccgcaggtgacaatggcatcggtgccgcttgtgatctgaaactcgatgagcttttcaagctcctcgtagtttacggacatatccgggttaaacggggtaacaagtgccaccgctgcgccggtaaaaatggtttctttcatctaaaaaatacctcctgaacggtatcagtcaaaatagcccttctttgcgagcagctctgcaagcagaacaccgccgcctgctgcgccgcgcagcgtgttgtgggaaaggcaaacgaacttgtagtcatactgggtatccgggcgcagtctgccgatggaaacggccataccatgctccagttcacggtcgagttttgcctgcggacggtctgcttccgtaaagtagtgcaggaactgcttcggtgcgctcggcagctcgagctcctgtgccgggccgcggaactctgtccaacggcggatgatttcctccggtgagaccttcttttccatggagacgaacaccgcagccgtatggccgtcggaaaccggcacgcggaagcactgtgccgtgatggacggggtggtcgcgttgacaatcttatcgccctcaatgtggccccacagcttcatcggctcctgctcggatttttcttcctcgccgccgatatacgggatgacgttgtcgagaatatcgggatacgtttcaaaggttttgccggcgccggagatggcctgatatgtgcaggcgagcaccttcgtgacgccgaggtccatcagcgggtgaatagccggaacgtagctctgaagggagcagttggactttacggcgataaagccgcgctttgtgccgaggcgctttctctgtgcgttgatgatttcaatgtggtcggcgttgatctccggcacaaccatcggcacatcctcgacgccgcggtttgcgctgttgttggagacgaccgggcactcttttttcgcataagcttcttcaagggcgcggatttcgtcttttttcatatcgacggcgcagaatacaaaatcgaccttggagacgacttcgtccatatctgcaacagcgtctaagatgatcatatccgccatacttgtgggaatgggcgttttcatagcccaacgcttttctacgacgcttttatatgttttaccggcggagcgggaagaggccgcaagcgcggtcacgttgaaccacggatgattttcaaggagtgttgcaaaacgctgaccgaccatgcctgtgcaaccaatgataccgacattatactttttcatttctttcacccgtcctgtttgcaggacatcctttcaaaaatgatgaaatgtacgctcaaaaacaaaattaaggtcaaatttcatttttgagcgaaaaaaaaccggttgaaatccggtcatacatacaatataatagaatgtgcacaggcttttacgaaagtctccctgcggaaaagctctgatagcactccatcctattgcagatgacagttacggggctttcgccacagcaaccagatccaagcgtaccacatgcgctgagatcttcggcggtgtgtcctttttctgcgggccgatgcctgtggagggccaaaacccgcggatactcttacaaaccgcgcctctatccttattataatacatggaatacggattgttgtcaatttatttatgaaaaattcttagaataatcctgcgtaatttgggggatgcggctattttaattcagattggaaggaatatacttggatacgcagactttacaaacaaaagattttgattttgagcttccggaagaacttatcgcccagacgccgattgaaccgcgtgacgcttcgcgcctgatggtgttggacaaaacaaccggtgagatcgagcacaggcattttcacgacatcacggagtatttgaatgagggcgattgtcttgtactcaacaattcccgtgttttgcctgcgcgtatttacggcattaaaaacgagaccggcgcgcacgttgaatttttgcttctgaaaaattgcggtgacgacgtatgggaagcacttgcaggtccgggcaagcgtgcaaaggtcggcacatcgttcatgttcgagggcagctccatgacctgcgaggtcattgaagtgaaggacgacggcaaccgcatgatccgcttccattacgacaagggcacgaacttcttcacggagctggataagattggccagatgccgctgccgccctatattaaagaaaagctcaaggataaagagcgctaccagacggtgtattccaaagaggaaggttctgccgctgcgccgacggccggtctgcactttacgccggagctgcttgatgcaattcgctcaaaaggcgtgaaggtcgtgttcgtcacactgcatgtcggccttggcacgttccgcccggtgagcgtggataacattctcgaccacaaaatgcatagcgagcattatcacatgccgaaagagactgccgatgccatcaacgagacgaagaaaaacggcggacgcgtgatcgctgtcggcactacgagctgccgcacgattgaatctgtcgcaaagaaatgcggcaaaatttgcgaggacgatgactggacggatatttttatctatccgggctttgaatttaagggccttgatgcgctcatcacgaacttccacttgccggaaagtacgctcatcatgctggtctccgcgcttgcgggccgcgaacacattttgaatgcgtataacactgccgtcaaggagcgctaccgcttcttcagcttcggcgacgccatgttcatcaaataaatttgaaaggaattttctttacatgtacaagcttatcaaaagagaaaaccacgcgcggcgcggcgagctccaaaccgtgcacggtacggtgcagacaccggcgtttatgaacgtcgcgacggctgcggcgattaagggtgcggtttctgcttacgaccttaaagatattaaatgtcaagtgatgctctccaacacgtaccacctgcatctgcgcccgggcgatgacgtggtgcgcaaaatgggcggcgtacgcaagtttaccggctgggacggccctgtactgacggacagcggcgggtttcaggttttctctctcgcgaagctgcgcaatatcaaagaagaaggcgtgacgtttgcgtcacacatcgacggccatcgcatcttcatgggcccggaggaaagcatgcgtattcagtccaacctcggttctaccatcgccatggcgtttgacgaatgcgtggaaaacccggcggaatacgactacgcgaaaaattcctgcgcacgcacagcacgctggctgcgccgctgcaaggcggagatgaacagactgaatgcgctgccggatacgatcaatccgaaccaaatgctgttcggcatcaaccagggttgcacatacatcgacctgcgcgtgaaccacatgaaggagattgcggaattggggctcgatggttatgctattggcggccttgcggtcggcgagccggcagaggtcatgtatgaagtgattgaagcggttgaagagcatatgccgcaggataagatccgctacctgatgggtgtgggcacgccgacaaatattctggaagcggtgcaccgcggcgttgatctgttcgactgcgtgatgccgagccgcaatgcacgccatggtcatgcatttacaaatgaaggcgtgcgcaatatgctcaatgcgaaatacacgctggacgatcaaccgatcgacccgacctgcgactgcccggtctgccgcaagttttcccgcgcttatattcaccaccttttcaaagcaggggagatgcttgccatgcgcttgacggttatgcacaatctttatttctacaacaatttgatggaacgcattcgtaacgcgctcgatgaagaccggtttgaagcattttatcaggagtattcagagaaatttaacaaaagaatttagaaaatccttgcaaccacgaatggcttttgttataatgtataaagttaatttggtgacgggtgtattgaccgctttgcagtcgaacggagcgcaccatgaaagaaaggaaagaaaaccatgaatttgagtgttttgacaacgacaggtgcagcagccggcggcaacatgtccagcatgctgatcatgctccttgtttacggtgcgatcatcgcggctatgtacttcatcttcttccgcccgcagaacaagaagaagaagaaggaagcggaaatgcgcaagaacgcacaggtcggcgacgagatcacgaccatcggcggtatttgcggcagaatcatcgctgtaaaggatgagaccgacagcgttatcatcgagaccggcagcgaccgtgcaagactgcgcatcaagcgttgggcgatcggcagcgtcgataccatccacgaggaagacgcgtaagtttcactctgtttaaaagcgaatagttttgagccccttggaataagtatgaaacaaaacttatttcaaggggctttttctatgctgaattttaagaagctgtttttgggtctcctgttttctgtgctgttttcggctgtgctgatcgcggtttgtgcctttatgattttaaagctcggctttttgccgtccgagcctatactcggtacggctgcggcggcgatcggcggcgtttccgtttttgcttccgctttccttgcggcgcgcctcgcgggggaaaaaggcttgctgcacggccttgtgcttggcacgctctatgcagttttctatgttgcgataagcgttatgctgtatgcaaatatgcggattgtacttcttgttatacggagcgtaatatttgtaatatgcagcgtatgcggtggagtaatgggcgtgaatagagatgaaaaaatcagattttaagccataattttgtagctgctaatcaagagtataagaacgattttgcatatttattcacaacggcttgtagcaaagcagaactgcatattcataagtttacataagattatagacataaatttgtgcagatgcaaaaatattcacggaagctcttgcaaatttggctaaaaagtattatagtatataagacagaagtgaggtggcgtatcatgaaaaacggcaaattgggctttatcggcataggaaacatggcgtccgcgattattggcggtatcttatcttccggcactttcccggtcggagatatttatatgtacaatccgcacgcggaaaaaatgcagcgctttacagaatccggctgcgtagcctgtacttctgccgaagaagttaccgagctttgtgatacggtgttcctttgcgtaaagccacagattttcccggaggtgctgcgcgttattgcgccgaccgttgcgaagaagaatgctgacgatgttgtcatcgtttcaatcgctgcgggcgtaacgtttaagaatttgcaggacgcgctcggcgcagaccgccgctacgtgcgtgccatgccgaacacgccgctgctgctcggtgagggcgctacggcgctgtgccggacaagcaatgtgccggaagaagactttgcgcgcgtgcgttccgctttctcctgctgcggtgtcacgcaggagattgacgaagcgcagatgaatgcggtgattgcggtcagtggcagctcgcctgcgtatttgtatctgcttgcaaagctcacttgtgattatgcagcgcagcagggcattgacccgaagaccgcgcttacactgttctgccagaccatgaaaggcagcgccgatatgcttttaaacagcggcaaagacccacaggcgcttatggatatggtcacgtcaaagggcggcacaacatttgctttgctgaatgtcttgaaagaacagggctttaatgaggcgatgatcagctcgtttgaagcctgcacgcaccgcgccgaagaactttccatgtgagtgtgcaaggcataacacggcgatgcttcacatatagattgaccatcttttataggtggtgaacgaaaatggaagcaaagccgaaatatgcaaaaccacgtagcctatctgttttaatggctttgcgcattttgttcctgctcggctttttgttcggctgcttattcgcacggacatcgcaaatagctatggcgccggtttccggctctgtgtggtttagggggccgtttgaaacgggaacggactttccgtttgtattttccgcatttttatttgattcgcttttttacgcattgccgatttttttatttggcatgacgtttttgggtgtgcttgtgattcccgctgcgataattctgaagggcttcacgcttggcacgtcgcttacggcactgattcggcttgagggtatcggatcgtattttcggcggtgctttgattatctgccgatgacaatgctgtgcatcacggtgcttttgctgcttgcggcggaagcgctttgcacggcaaggcgcagctgtcgggtgtttttcggaaacggagaaccgctttccgtaaaaaactgcaccgtgcggtttttgcttgcgtttgcggcgctggttttcatttcgattttatacggtgcattgcactttttgattttgcaaatttagattagattttaaagcaaaggaggccgaaatgaatgaacatggatgaatacttcgtgctgtttcgcgagtacatgctcgtgcagaaaccgagttccgtaaatacgcgggattcttatctgcgcgatgtttcggctttcctgcgctacttggagggtgaaaatataacatctccactcgaagtggaaacggagacggtggaagcgtatgtgcagcatttgcacagcttaaaccgcacaaattccacgatctcccgcaatattgcctctgtgcgttgcttttataagtttctcatcctgcgcggggatatgcaggtgaacccggcgaaatccgtaaagcttgaaaaagagccgaaaaagctgccgcagacgctgacaagcgaggagatagacctgctgctttcccagccgaatgtcacggaagctaagggctgccgcgataaagcgatgctggagcttctttatgccaccggtattcgcgtcagtgagctcatcaacctcaacgtgcaggatatcaacctgcgcacgggaaagctgttctgccgcggcaccaagggcgtgcgcaccattccgatttatgcgaaagcggtcgttgctgtgtccgattatctttaccgcatgcgcgatttgatcgtggacccggacaacagcggagacgcgctgtttgtcaatctgaacggctcgcgtttgacgcgtcagggtttctggaaaattatcaaggcgtatacggcggaggccggcattacgaaggagattacgccgcacacgctgcgtcattcgtttgccatgcaccttttgcagggtggtgcttccgtaaaagacattcaaaccatgatgggacatgcagatatttcgtccacacaggtatatgttcatttattagaccttgataatcacgtgaaaagcgtgtataatgagtgtcatcctcgtgcaaaaacgagttaatctaattctggagttgattttgtggcatttttaggacttttcggtaattatgataagccgggtccgggcgttgacaaagatgaaccgaaaaaggcagcgccggtacgtttttttgagatcttgtggcgaaagctgtctaaactggtgcagttgaatctgacatttatgatcccatttattgtggtcatcgcgttgatggtgggcgtatttcttttaccggttccgcattttctttatgcaacgtcgttcttcggtgtgcttgacctgtacattctgtatgcggttacactgccgctcatcctgctttcgccgttcacatgcggcttagcatatgtaacgcgaaacttcgcaagggaagagcatgcgttcgtttggtcggatttctgggacgctgtgaaaaacaactggaagccggcacttttgaacggcgtgatcgtgtatctcgcatatgtaatcttgagcttctcaatcttcttttattccacacgtgtatcggacaactggatgtttatgattccgcttgcagtttgctgcatcctgtcgattctaatgctgtttgcgcagtattacattccggttatgatcgtcacgtttgacttgaagctgcgccacatttacagaaacgcgtttattttctctattatgggtctgttgcgcaacctgatgattacggcaatccttgcgggtttattcattgcgtttttgttctgcccggcggcatttgcagtgatcccgctgctgctcgtaatcattttcctgtgtgcgttcatcagctatctgacgagctttgcgacgtattcgttgctcgatacgtacctgatccagccgttctacaaaaaggaagcggaagcgaaggacgctgaaattcgcgtagccaaagacggcgatacgttcaatttcgacaatgatgagttggacgacgatgacgacgataagccgcagtatgtgtacgtgaacggccgcttgatcgaccgtaagatcatggagcaggaatctctgttctcggataaaacggatacttccgatcatttacagtaatttaaaacaaacataaaagcctctatcgaactgaaatcgatagaggctttcattttgctcaatttcaattatttctcattcttatcagtcttttcacgcattttggaaagtgggttggcgtttacggcttcctccatttgcttgctggaggtgtgcgtgtagatctctgtagtgccgagattttcgtggcccagaatatcctgcaaaacgcgaatatctacgttgccgtattggtacatcagcgtcgccgccgtgtgccgcagcttgtgtacggagtatcccgcgccgccaagaccgattttcgtgaggtatttattgaccatggcctgtacggtcttaggactgatgcgtgtgccgcggttgctgatgaacagcgcgtttttatccttcacgtcgtcctttgggcgcacacgcacgtagccatcgatagaagctaagcatgcgtcatttaagtatacgatgcgttctttgctgcctttaccgacgatgcgcagggtggagttgttgtggatcacgtcgctcatgttgatggaaacaagctcggaaaggcgcatgccgcagtttaaaaacagcgtcaaaatgcaatagtcacgctctttatccggcccgtccacggcgtttaaaagctcgcggctttgctctaacgtgaggtagcggggaagggttttggcttttttcggcggggtcagattctctgtggggttagaatccaaaagaccctcgtgcacggtcaggtagttaaaaaagcttttgagactcgaagattttcgctgacgcgtggagctcatgttgctgcgtccgtcggcagcgtagttcatgaattcaaaaatgtccatcgtcgtgatggaacggataaattcaaggtcaatatcgtcgattggaatctcctccatgggcgtatcttgtgaaacatatccgcgaaaatgtttcatgaaacgaaagaatgtccgcaggtcagagcagtattcgtttacagtcttcggcgcgcggcctttgatgttgcggtaatataaagcatattgccgcacaatctccggcatttcagacaaaatatccataacgggtacacctcacaaattttgaattttaaagccgcagcttggtgttcagctccgttggcttcaaagctttcgggtttagcctaatcgatacttgaatttactcttggatcatcattataattcggaacgagacgtatagacatgccgtggtacttaaacagacagctgaataaacggagccgaggttattaaaaacaatctaattgagaaacgcacggatttccgcagccgagatttacaaagaatcaacgcacacaatcacgattcataatgaatgcgtttatttaagcaagttgcaatcgcaaaacattgagtttggctgaaaaaggatgatctcgcaggttttacgaaaatccgcttgaaaagccagctattcgtaaaatgctgctccccaaaattatacaaaatatctattttgtataatttgagattttttagattcaagcccctttgtatgcttccgtgtgaatctgttttgaaatgtgcgtgtttgggtgcttgtacatgaatacacaagcgtttagtgtattatcaacaacggaaacttcgtgggaggctttttaaacacaaaattaggaattaaacgtcaagctccatcagcggtaaaatgccgccgatatcgatcatctggttttgtgtcagctcaatgtactgtacgcagtgcttttcgagaaacgcacgaatctccgccgcgcactctaaagaatcgagcttgcctgtgaacgccaccacatttttgtcgatcaagccacagcagccgcctaagaagccgtaatcgtagccatccagaaaaacgttttcttcgtgcacaagcagcacgtcgatgcctaaaaactgtgccagtgcacgaatgccgagatccatcgtgatgatcgcgtctttcgccacaacagccgtcgcacagcgcgtgtagccttggttgacatgcctcattttaaggccggcgtcttccagacaggtgtaaatgttcggatccataacaccgaggtttgcaagcaccgtgccgttcaggtttaacatgttgcaaagaacatctttcggatatttcggctccggagtcatggcagtctccgctacctgatagccgatatccgtaagctgctttttgagtgcctcttctccgcgcagaacaaacgtgcgtcctttatccaaatgaaacatctgcatatctgcatggtacgcgatcggatccggcagacgcgtgtcaaactccgttgtgacgcaccgaataccatgcgcctttaaagcttccaaaatctccggatatgcgccggagaccgccgctgtcgtgaccttgctttccggcagattcggcttttcaacaaatcgttcttttactgcacacatgcgtcaaacgcctccctcacgttgtggacgccgatgagctccaccccgctgaatctttttgaatctatgctcttcatgctgtggtacggcagtacgcagcgcgtgaatcccagtcgatatgcttccgaaacgcgggactcgatatgactgaccgaccgcagctcgcctgcaagaccaatctcgccgaacacgacggtatcatcgcggattggcgtgtctttcaggcttgatacgagtgccattgcaacggccagatcgaccgccggctcatcgatacgcaggccgccgacgacgttcaaatacgcgtctaaattggaaaaatagaaacctgcacgcttttccagaacggccaaaatcagcgccatacgcgcataatcaaagcccgtggacatgcggcgcggcgtaccgaagccgcttgtcgttgcaaggccttgaatctccgcgagcagcggacgtgtaccctccattacggcggttacgcatgtgccggaagcgttcgtcgggcggccggaaagcattgcctgcgaggggttttcgatttgccgcagccccgcttcccccatatcgaatacgccaatctcgtttgtggagccatagcggttttttacggcgcgcagaatgcggtacgtcatctggcggtcgccctcgaagtacagcacggcgtccacaatgtgctccaacacctttggacccgcgatggcgccgtctttgttgacgtgaccaacgagaatcgccgggatatcgagcgacttggagcagcgcatgatcgcgttcgtgcattcgcgcacctgtgtgacgctgccgggcgacgaattgagatcggtaaagttcatcgtttggatggagtcgatcattacgatatccggtttttcggtgcgaatgtgctccaccacgagctgcacgtccgtttccgccaaaatgcgcaggttgggactggaaacaccgagacgccctgcgcgcagcttgatctgccgtgcagattcttcgccggaaacatataaaatacgcagcttttgcccgaggtattcgcagatctgcaaaagaatggttgatttgccgatacccgggtcgccgctgatgagcacgagcgagccttttacaaggccgccgccaagcacgcggtcaagctccgaaagtccggtgtgataacgatgctcgtcctccgtatcgatctctgaaattgcaagcgggcgcgtcagcagcgtagaagctgaagaagaatacccggaagcggcggattttgcggaaacagccgttttgacggattcctccatggtgttccactcgccgcaatccgggcactttcctgcccactttgcggattcaaacccgcagtttgagcagatgtagacgattttatttttagccgccataatgcgcaccgcccttattttgtataattctaagcctattttaccacggaacagatgttttgtaaagagttattccgctttgcaaaaggcgataatgccatccgcgatagccgccgccaatttcttttggtagttctcgtcgcacagcttttcagcttcttccgggtttgagaggaacccgcattctgcaaacacggcgggtacgtctacatggctcaaaatatacacgcggctttctgcctgcttgcaggcacgcgtgttatccggctgcacctgctcgatgaccgcacggcggatggtttcggcaaggtcggcgcttctagcattatttgctgagtaaaacatctgtgcgccgctgtattgactttgctcaaaaaagttttgatggatgctcacgaaaatacagttctcagtttcgtttacgatctgtgtgcggtataaaatatcagaccgctttcgttcgtttaatgtgctcagcgtggtatcgccgacggcggtgtccacttcgcgaatcattttcacggggtagcccgcagcttcgagcttctctcgcacaaacagcgcaatggcaaggtttaccgttttctcttccacaccgtttacgcctacggccccgccgtcttccccaccgtgccctgcatccagaacgatcacggggcggttttcggtctgtgctgcggccacagataccgcatgtaccgcacccaaaacagagcacacaaaaaatgtcagagcaccgaggaaaaacaccacaggaatatacgcgattttaaaagacaaataccgtttcaagccgcatcacccatagatttttatgcattgaagctgccggaaataccctataaaaagcaaaaagctgcccgccgaagcgaacagcttttttagcttttatgaaattacttgaagaacagcgggagcggctccagatagatgatatccgtacgatcctttgcatcgccctcggcgagcacagccgccttgccgacgacgttaccgccgatctcatgcacgagatcttccaacgcgctcagcgattcaccggtgctgatgacgtcgtctacgatgagaatacgcttacccttcagcattgcgcagtcttcttcggagaggtacagcgtctggatgtggtctgtcgtgatggatttcacctcgaccttgatcgggttcgtcatgtacgccttgatgcccttacgtgcaacaacgtactgacggcagccgatgcgcgccatctcgtaagccagcggaatgcccttagactccgccgtgatgatgatgtcgtgctccgggcacttttccatcagcgcttttgcggccttctcggtgatctctacatcgccgaacataacaaaaccggcaatatccagcgtatcgctgatcgggcagatcggcagctcgcgttcgcagccggcgatcgtcatcttataaacttcacccattgtaaaaacctaccttcaaaaattatcgattttcgtcatatgcggggaatcagcccggaggccacgccatagagcgtccgccgagcaggtggaaatgcaggtgctttacggtctgtccgccgtcttcgccgcagttgttgacgatgcgatagccgttcgtgagaccttctgccgccgcaatcttctttgcgaccgtgaagatatgtgcgacgatctgcgcgttttcttccgtaaggtcatctgcggaagcgatgtgctcctttggaatcatcagaatgtgcaccggcgcctgcgggtcgaggtcgcggaatgcgagcattttgtcgtcttcgtagaccttcgtgctcggaatctcgccgttggcaatcttgcagaaaatgcagtccatttgcctttctcctttcttgagattttatatagaacgtatagagagaacttagatctgttcgctgaggatcttttcaacagctgcaagggcttcgtcaatcttcgtctggtccttgacgcctgccatagcgaagtccggtttaccgccgccgttgccgccggtgagctgtgcaactgcctttacaagcacgccggctttgacgccctttgcctgtgccgctttcgttgcggtcgctgcaagcgttgcctttccgtccagaacgcctgcgagcacggctacaatggccgtatcgctcttttcgtcgcggatcttatcgcacatggtgcgcagtgcgtcgctgcctgtgccggagagcatcgccgtaacgatcttgacacccttaacttccacggcgttatccagaatggagccgaggttcatggatgcaatcttggagcgcatggattcgatctctctgtccttctccttgaggtcggcgttgacctgtgcagcttttgccgggaggtcggacgggttattgactttcatcgcaacagcggtatccttgagcagcgtgttcgttgcgtagatcatcttaatgacgttgagacctgtgaccgcttcgatacggcgcacaccggctgcaacggaggattcgctgacgagcttgaagaggccgagcttagcggtggaatcaatatgcgtgccgccgcagaattccttagagaattcgcctaccgttacaacgcgcacgacgtcgccgtatttttcgccgaacaacgccatagcaccgagcttctttgcttcttcgatcggcatttcgcggcactcaaccttgatgtcttcgaggatcttcttgttgacgaggttctcaaccgcgagcagctcttcgtccgtcagggcggagaagtgcgtgaagtcgaaacgaacggcattctcgttgacgagctgaccggcctgctcaacatggtcgccgagcacggagcgcagtgcagcctgcaggaggtgagctgccgtgtggttgcgcatgatcgctctgcgtctctcaacatctacaacagcctcaacggtgtcgccttcgcggaggaagccttcctccacaacagccttgtggataaacacacccgctgcattcttcgtggtatccagaacgcggatggtgcaggaatcgttcgtgatgacgccggtatcgccgacctggccgccgctttccgcatagaaagaggtgcggtcgagtgtgaacacgatgtcgtcgccggtctcggcagcttcaatgcgtgcgccatccttcacgatagccgtgacctttgcggttgccttcatatcggtgtagccgacaaattcggtctttgcaatgtcgtcaagcacagcggagtcgcctgcccatgcgtctgcaccggcattcttgcggcttgcacgagccgtctcacgctgctggagtaccagtgcgcggaagcggtcttcgtcaacgctcatgcctttttcggaaaggatttccttggtcaggtcaatcgggaagccgaacgtatcgctgagcaggaacgcgtcttcgccggaaagcacctttgcatcggtgcggtcgatgatgtcgttgagcagcgcgaagcccttatcaatggtcttatagaagttttcttcctcaaacgcgatgacctttttgatcatagcactcttttcacgcagctccgggtaagcgcattcgttttcgtgaatgacagtatctacaacgtccgcgaggaacgggtggttgatgccgagaagtctgccatggcgtgccgcgcggcggagcagacggcggagcacatagccgcggccttcgttggacggcataacaccatcgctgatcataaacgtcgtgctgcggatgtggtccgtaatgacgcgcagagaaacatcggacttttcgtccgcaccgtactgcacatttgcaatgcgggagatatgcttcatgatgttctgcacggtatcgacaaggaacaggttgtccacgccttgcatcacacatgccaaacgttcaagacccatgccggtatcgatgttcggatggtcaagcggcgtgtagttgttgttgccgtcgttctcaaactgcgtgaaaacgaggttccaaacctcaacgtaacggtcgcagtcgcaacccacgccgcaggtgggcttgccgcagccgtacttttcgccgcggtcaaaataaatttcggaacacggaccgcacggaccggagccatgctcccagaagttatcttctctgccaaggcgtaccatatgcgacgggtctacgccgttttgctttgtccagatgtcaaacgcttcatcgtcgtcctgataaatggagatataaagcctatctgccggcatctcgagaacttttgtaaagaactcccaagcccaggcggtcgcttcctttttgaagtaatcgccaaaggagaagttgccaagcatctcgaagaatgtaccgtggcgtgccgtgatgcccacgcgctcgatatccggggtacggatgcacttctggcaggtggtaacgcgctttctcggcggggtcacttcacccgtaaaatactttttcatcggggccatgccggagttgatcagaagaaggctattgtcatccttcggaatcagcgggaagctcggcaggcgcagatgtcccttagactcaaagaaagaaagatacttttctctgagatcatttaatcctgtccactgcattgtattcaccattccttctataatttgcagatagaataatataaaaagcctaagctcagtctaaaacataagcctcaagcagctttaacgtattttcgacgccttcaatgtgggagcgctcgtagccgtgtgaagcgtaaacgcctgcgccgatgaggccgtgacgcacgtcccagccggaacgcagcgatgcctctacgtcggagccgtagtgcggataaacgtccacggcatactttgcaccgacggacttcgccgcttccacaagcgcggttgtcacggcataattgtacgggccgccggaatccttcgcgcagatggaaacttcgcgctccgtgcaggtgagcccgtcgcccacgcagcccatgtctacgctgatgagctcttcggcatcgttcggcacggaagcggaagcaccgtgtccgacctcctcatacaccgtaaagtgcagatagaccttgcgcttcaaagtgcggttgttgtctttgatctcctttgcgagcgcaagcagcatggcggcgctgagcttatcatcgaggaaacggctcttgatatagccgctttccgtgatgacggtgcgcgggtcgaagcagacgaaatcacccacttcaatgccaagtgcgcgcacatcatcggcggattttaccggctcgtcgagcacgacctcggtcgtttcaaatgtgcgcagcttttcaccgtaggagccgttcacgtggatcgacgcattgcaaagctgcaaggtgccgctgtaaacgccggagaagcgcgagtaaatgcggcagttctccgcttcgcagttttcggcgcgcaggccgccgatcggcgtgatcgtgatgcggccgttcggcttgattgtggaaatcatgccgccgagcgtgtctacgtgtgccatcagcacaagcgggctgccctcgccgccgaggcagcagaaaacgccgccctttcttgttctttccggagcgtagccgagtgctgtcagttcaccgataagatagtccgccgctttatccgtaaagccggacggagaatcgatggaaagcagggctttgagctcggaaaggcaataatccatattcatgttttgccactccttacaaaaaaataagaactgtcctccgcaatgggacggacagttccgtggtaccacccaaattatgcatgaagcttttcttcatacaccactttgaactccttaacgcggaaaacggcacagctcatcactgtgcggcagtcatacgggttggcctgtacatggtgttttccgaggatcttccagcctgtggatccgctctctgttcggtacagctatgtgcatttgcccgtgccttttgctataaaacaaattaaaatctaaaatcaccagcggctcatgtttcgtttgtgcttttcgagatatacgttctcgacttcattcggcgtgatgccgtagcacagcagaacatcgtttaaatacatgagcacatcacacacttcttccgtgaagtggtgtctggtctcggggtcgttcaaaatcgcatcgtcaccctttttcttgatgatgtcggcaacttcaccggcttcgatcatcatccaaaggagcttatcgcgaccgatttttggagaaaggcctccccacttttcgagatattttgcttgcagttctttttgaatctgctgcatatcttcaagattcaggcttgccatatctccacccctcatacgcatcttattataatgcttttttaccggcttgtcaattaaaatcgacaagagcttcgccgattttgcggaaagcctgcggcacatgcatttcgccggcagtttcttccaacacgacgagggtataaagcggctcttcctgtgcattgcagatgtagcctgcataccaataattctcgatttcttccccgttttcgtcatatacacctgtctgcgccgtgccggtcttgatgccggaaacacagttttgcggcgcgccgatccgtgctgtaccgaatcgtgctgtgctttccatataggcacgtaagcgtgcggcggtcgtcggctccatgactttttcaccggtgttttcttcggtttcctgtacggataaatttgtatcgaccgtgccgtatacgagccgcggcgtcatataaatgccgtcagcggcgatggcgtttacggcagcggccaaattcagcggcgagacagtcgtttcaccctggccgaacgaaaacagcgccagcgcacgggcgtttttaagggcttgcgcgttcgaaagcgagcctgcggccgtttctaaattgtctgcaagcgaaacagatgtaccaaagccgagcttttccgccatacttaaaatcttttccgcgccgagcttctgcacgagctgtatgaaatacccgttgcacgagctgcgcaacgctgtgtggagattcacttccccatgtgctttgccgccgtagcaagtgatcgtgaggccgtcaacaacaatgcttccggtgcaggtatacacctccttgtaatcgatgccgcattcgagcgccgaggcggcgcagatgagcttaaagaccgaaccgggcgtatacgcgcacaatgcacggtttacaaacggtgcatcttcattttccatgcacgcagcaaggtcgttcgggtctacggccgggaagcttgcggaagccagaatttcgccggttttgcagtctaaaatgacggcggcgccttttttgatttccgcgcaggcattttccacacattgctgtatgcgcttatccagtgtcagcatcacgccgccgtccgcaaagcggtatgtgttttccacgtgcattgtttcgccggagatggcattgccgagcgcatcaatggcgaaggtaacgtcgatttccccgtggttttccgcaagcagtgcgtcgaagcttttttccacaccgtccgcgccgttatagtcgctgtcgagatacccgagcagattcgccgccggttgcgggtttgcataccgttttgtgacggaaaatgtctggatgccgtcatcactgacgggtgttgtgacttcgatcagaaacggctttccactttcaagcgccgtgcgcaggacttcgcgtttttcttccggtacagcgcggtttaatttggcaagcgtttcccgcgaggggattaccgcagcgacataaacacgctcggcgtttgtgagtggctgcaaattgcggtcgtagatcgtgccgcgcgccttggcggccgttaaggtatataaactctgccgcccggcggcctccgtatagcttgtgccgccgaaagcggcggtcacggtgccgagcagtgcgatgacgagaaagaacatcacaaatgcatacgttgcgatgatcctgcgtgtagacataaaaacacctccgtataggaaaagtatgagccctaaacggaggtgttattcagccgcgcttcactcttagaaacgcgccctctttgatttttcggtcggtcttgaggtagaccgtcatcgtcgcgtgcggtgcggattcgattggctccatatcctcgttgtagatttcactaagtgtgaggtcatacggcacttcgcccggctccagtacgctgacagtctcgccgcggaagaagcggttgcgctgtgaaaggcgcatcatgccgtttccttcgccggtgcacacggccgcaacatcccagccgcggatgtatccgccgctgtttacggtctgccccggctcgtgaccgctgtaaaacccggtgctgtacgcgcgatggctgatcttctctgtctcgtccacgacccactgcggaagcggctcaccgttcatgacagcatcgatgccgtggcggtacgcattcgtcacgcaggcaacgtaatacgcggactttgcgcggccctcaattttgaggctcgaaatgccgcattcgatgagctgcggaatgtgctcgatcatgcacatatcgcgggaattgaagacatacgtcgatttctgatcctgttcgatcatgaatacctgatccgggcgcgtgcgctcgatgaggtaataatcccagcggcacggctgcgcgcaatcgccgtgatttgcgtctctgccggtcatgtagtttgaaagcaggcagcggcctgagaacgaaacgcacatcgcaccgtgcacaaatgcttcgatttcgagcgccttcggcgttttcgcgcggatctccgcgatttcttcaaacgagagctcgcgtgccagcacgacgcgctctgcgcccatgttataaaacgcgtttgcggtctcataattcacaacgccggcctgcgtggaaatgtgtatcacgacattcggcgcgtatttttttgccatggccatcacgccgaggtcggtcatgatgaacgcgtctacaccgattgcctggcaaaactcgagaaacgccggcagcgcggcaagttctgcgttatgcggcagaatattacaggtgacatagaccttcacgccctgcgcgtggcagtattttacagcttcttcaagctcctcgtttgtaaaattggaaggcgcagagcgcatgccgaaggatttaccggcaagatacaccgcgtccgcaccgtagcgcacggcagaaataaggcgctccatatcgccgaccggcgccagaagctccggcgcgttatatcgtttttgttccatgaaattcattcctttactgcatttgtgccttcccggacaaaattcgccggaaaggcacaggtagctttgttatcgtaaatgttgtgtcggttacagcagaccggcttccgccatgttcatcaaatgctcgtccattgtggaagcatagtacggggtgccgtcactgtcatggcagaagaagtaatactcgctgccctcttcggacggatagattgccgccttaatagcttcgagacccgggttgcaaatcgggcctgccggcaggccgctgttgtcatacgtggagtacgagcttacgaagccctccggcgcgtcattcgcggttttgtacggataataaactgtggagtcgcagtccagcgtgtggatgtcatgctccgcgccgttttccagtcggttgcgcaaaatagcggagatcatatacatgtcgtccgtatttgcggcttctgcctgaatgatggaagcgagcgtgatgatctgatccgtggtatagccggatttcgcaatgtcatcgcgcatttcgtcggtgagcttattttcaaagttattgaggaagcggtcaaggatcgattctaccgtatcgttttcaaagaactggtacgtatccgggaacagatagccctcgagcttatagtagcggtcacttgtgttcgtgatggctgcaacatccgagtagctgtcgtaattcgaagagttgcaagcttcaaggatctcgtctgcagtgtgcaggccgttttcttccagcaaagcggcaagctgctgcaccgtgatgccctcacggaacatgacggtgatctcttcgccgagatccggaccggactgtaaggtattgacaagctgcttataatcgtagtttgttttgatcgtatacgtgccgggttcaaaatactccatttccgtggtgaatttgcagaaaagggagaaaaactccggtttatcgatcgcgtggctcttgtaaagaatgtctgtcagctgctcctgcgtcacgttttcgggaatcgtgacctccacttcggaatccatgcggtctacaccaagaaaatcgttggagccgccaatcaggtacgaagcaagggtcagagagaccagaataaccatggcaagccacgtgaacgcgaaaatgcgcttgttttttctggcctttacacggtttcttttcttgtgctccttcgcttcctttttctgattgcgttccgcgcgggcggagcgtgcaccggcagagctttcttccacacgctgtggtgcgcggctgccagcatagccctgcaagtcctccagttcgtctgtgtgattgagctgatcttcggaaagattcagcttgaattcgcgcgaattctggctgcgcggtgtcgcgtccttcggggcatagcgcctgccgttatcactcatattttcattccatcctttcttcatctgccgtcaaaacgagccgcttgtcggtcaaaataccgtccatgcgcacatcgtgcggctgcgtcggcacttgcggcacgagctgaaaatcgtagcatagaccgagctttaaaaccgggtgctgcgcaaaaaacgtatcgtagtaccctttgccgtacccgagccgtgcgccgttcgctgaaaacgccagtcccggcacaaggcacagcgcacttgcttcatcttgataaacctctgcttctttcggctccaaaatgccgtaagcgcccggcgaaagatcgcgtaaagccgagatgcggtaaaacaccatgcggttcgtgtttggtacgcatttcggtacgtaaagcgctttgccgtctgcaagtacacgatcgagaattctgagcgtatccgcttccgtgccgaagcttacgtagctcaaaacgcacgatgccttttggtacaccgaaagtgccatgagccgctgcaaaaggcagttatcccgtgtagcacgatccgtgcaggctttgcgtgccgcacacatttttcggcgcagtgcgtttttttcggttgtatcggtcatcaatccgtgcactgaatgccgtcgtggatcttcttttcaacgtccttgccgaccatgagaccagcaagcgtcaagccaaactgcacggcaacgcccatgccttttgccgtgacgatcttgccgtctacgcagaccggcttttcggagattgtggcgccctttaattcgccttcaaagcccgggaagcagatggcttccttaccgttcaggaggccgagatggccgagaacgctcggtgcagcgcagattgccgcaaggtaaatgtcgttctttgcgcagtattccgcgcaggttgtgacgatcggcgatttttcgaggttcagtgtgccgggcatgccgccgggcaggatcatcagctccatatcgtccgttgtaacgtctttttcttcgatgtcagctgttacggtgatgccgtgggagccggtgattgttttgccgccgacgccgacgatctttacttcaagctctgcgcggcgcagaatatccacgggcgcgagcgcttcaatctcttcaaatccgtttgcaagaaatacatagatcataataaatcctccagcttttccttgatctcgtgatgaatatcttcaatgctgcgcaaggtgtcgccctcggcgcagtttaatacggtccagtttaaatgctctgcggcgtacagtgcacagtccctgcaatgtagcagataatgtatgtcgctttcgtgaatgtcttttttggtggtgtcgcctgcgtagcgctctgtgagcagcctttgggaaattttcggcggcacatccagataaatcacacgatccggcctcggcagcccgaatttttcatattccaggtcttcaagccacgaaacgaacgctttccactccgttttcggcagcttacttaattgatatacaatgttggacgtcacgtagcggtcggagatgatcggcacaccgcttgcataatcgtctttccacttcatgcggtagcttgcaaagcgatccacggcgtaaaatgcgcttgcggcgtaggcgttcacgtctcccgcctcttttccgaaatcgcctttcagatacatttttacaagcgacgaagacggagagtcataatccgggaacgttacctgccgtgcgcggccgcgcgataaggcgtaatcatacaaaagctttgcctgcgtgcctttgccgctgccgtccagaccttcaattacaatcaatgccataagtttcatttactgctttctgcgtaaatttgccggcctttgccgactttttgcaccgcagcgcggtacattcctattcattatagcaaactgcggcgaaatatacaaccgaaaaatttcttacaatgcgaaaaaaccgagcaaagcggcgggacaggcacaatacccgccctttttcgtacaatggcattgagaaaccacaaaggaggtttacaaatatggctgaaaatgagcggacacccgattgcgaaaacggcgcagcgttaaaagaagccgtctgcatagatgccatgcgcatttacgattcctgttcagataaagactgcttagaggatttacgtgtgctgtttcccgcctcggtgcagcccgttgtggacgcttccgctaatgtgcgggtgcgggacgttgatgtaatctctgtgtacattgatatgcagccgatcccctttaaccgcgggtattactccattgatctcacgtttttctttgacgtatctttggagctgtacggcggcgcgacagtgggctgcgaacgcgtgagcggtatttcaattttcaataagaaggtcattctctacggcagtgagggcaacgtgaagatgtttacaagcgagagctgccgtgacgaagccgatttacagggcaataaggtcttacccaaggcgactgtgcaggtcgcgcagccggtagcgctttccgcaaagctttgcgagcactgccgctgcggctgcgagccctgctgcgtgatcccggactgcattgcaaaccgttacggcggcgcgtttgaaacggtagagcagaaaaacaccgtatacgtgacgatcggcctgtttaccatcgtgcagattgtgcggaatgtgcagatgctcattcccgcgtttgatttctgcattccggataaggaatgcgtcacctccggcgacaacccctgcgagctgttccgcaagattgatttcccgaccgacgaatttttcccgccgaaagcgagcgactgcggctgtggctgcggcagacaaaattagaaccgcatttgaataatataagccgtgcactttgaaaacaggtgcacggcttactctttttatacttttgtcagtcttgcgaagtttgcaaacagctttttggtgccgactttatcaaacgcgacttcgagtagcgtatcgttcgccatcggcgtggcggaaacgatgagacccgtgccgaacgccttgtgcaggacagtatcgcctacgcggtatgtaccggcaggcgcgggctttacgcgcggcttcggcgtgaatccaccggcttccgcaacggattttgttttcggtgcttccccgaacggcttcgcgccgccgaagctcggcatagagaccgggcgcgcgctgtaatcgcgggagcgggtgtgctcgacgagcgtctccgggatttcttccacaaagcgcgaaacgcggttgcggttcgtcatgccgaagatcatgcgggattctgcgtggaaaatgtacagctcctcttttgcacgcgtgatggcaacatacgccaaacggcgttcctcctccacttcggacggtacatatacgctcgccatgcccgggaaaatgttttcctccatgcccggcaggaacaccaccgggaattcgagaccttttgcggagtgcaccgtcatgagcacgacggaatcggcgttattatcgtaattatcgatgtccgtgatgagcgaaacttcttcgagaaaatccgaaagcgtgccttcggggttctcctcctcaaaacggcgcaggttggaagcaagctcctgcacgttcgcggcgcggtcttctgcggattccgggtcgtcggtcttaagaaaattcaggtaatcgatgcgctccacaagctcgtcataaagctcgccgagcgtgacttcttcgtcgttgttgagctcgatgagtccctgcatctgtgcggcgaaaagcgtcattttgtttgcggcacgggacagtgcgggataatctttcgcgtgcgagacgacctcaaacagtgtctcacccgtctgctgaccgatctgcgccgcgacttcgaccgagcggtcgccaatgctgcgcttcggcgtgttgatgatgcggcgcaggcgcatttcatcactcggattgttgataacgctcaaatatgcgatcatctcgcggatctcacggcgctcgtagaagcgcgtgccgcctataattctatgcggtacgccggattttgcaaaattgcgttcaaatgtcagcgactgtgagttcatgcggtacaaaacagcgtaatcggagaatttccgccccgcagcaacgccgtctaagatgatcttcgtgatacgctcggcttcgtccgtttcgttttccgccgtgtgcaggtggatcatggcgccggtgccgttctgcgtccacagcgttttgccttttcgctcggtgttatgctcaatgacggcgttcgcagcgtccaaaatgttctgcgtcgagcgataattctgctccaaacgaatgaccgtcgcattctgaaacgtattttcaaagcttagaatgttttcgatcgtcgcaccgcggaatttgtagatgctctggtcgtcgtcgccgaccacgcagaggttaccgcttttttcggccagcatgcgcacaaatgtgtactgcgcatggtttgtgtcctgatactcgtcaaccattaggtagcggaaacggttctggtagtattccagaacgtccgggcactttttgaagagctccactattttgttgatgaggtcgtcaaagtccatagcatcggcgtcttccaaacgcttttggtacgttgtatacgcgcgggagataatctttaatctgaaatcgtcgccgaccgtgagggcgtactcagcaggcgagattaaagaatcctttgcccgggaaatctcgttcaaaatcgattttggcgtgatgtttttttccgaaatatcgagctcttttaagatgtttttcatcaagcggcgctggtcgtcggtatcgtacaccgtaaagtgcgaggaatacccgatgcgctcgccgtcacggcgcaaaatacgcgcgcaggtggagtggaacgtcgatgcccaaatgtcgttggcggtctcgcccagcatggcacacaggcggtctttcagctcgcctgcagccttatttgtaaaggtaatagccatgatgcgccacggcgcgcaggcagaaacactcaaatgctcctgtgtttccgttgtgagcggcgtgccgttttcaatataagctttgcacgcggcaatatcattttcatcgagatcgtcatgcagataggtgctgttgtacgcgtcgccgtagcgtaggatattcgcgatgcggttgatgagcaccgttgtttttccgctgcctgcgcccgctaaaatgagcagcgggccgtttacggtgaacacggcctgcttttggcggtcattcatgcgtgcaaagtctttttccagcaccgcacggcgcagtgcaagaatttccgatttatccataggttcaaatgatctccgttctgttggttctgtgtcttctcgtttttcggtttctattttactatatcttgcaaaaaagttcaatcgaacatagaaaattcccgggacgagctttaaatcagccccgagaggtttatgtgtaagttaatatgactttacaaagcaactcaactttgcaaagtcgatacgctttacattacgcaagcatcttacgcaccatgtcgtaaagcacgggtttcatattgtctattgtatccggcttattttcaatcatcgtggcaaagcaagtggaaccaatgagctcaaccaccaaaaacacgcgcttatataagacatcttctgtgcagcccacggcgagcgagctgctctcaatggcagtgacaagcttgtcccacaacgggtcttctcttagatcaagctgcttttcaatcatcggccaggagaaattgcgctccaaaagccgcagtgtcagacggcttcttttaaagtattccacgatgtaatcgaccatgaggatgatgtcttctacaaaaacgccagtcttatgctcttccgcatattcataggcctcactcaaaacacgcgcagaaatgcggtatgtgagctgctgcagaagctgggttttatcgtgaaaatacagataaaacgtaccctttgcgacgttcgctttctttacgatctcatcgaccgaggtcttgttaacgcccttttcaaggaaaagctgataggccgcctcgagcagcccctcctttttctgttcttttttctgttcaacaccgccgcgcatggctgtggcctcccaacattcaaatctaactgtgtaatcacttcatttgttttatagtataaggcggatacaccgtaaaaagcaagccaaaaacaacattttgtacagatttgaataaaatgactaatagtcaatttattttgcctacacagttcgtcacttttaatattgactattggtcatttttggactaaactacataacgaaataaacgggatggttcccgaatgaaaggagcggtgctaaatggagcactttgcacgatggatcgtgaagcgcagaaagctgattcttgttttagcggttctgcttttgatcccctcggtgttcggtgcgctcggcacctacattaactacgatattttgacctacctgccgaaaaatctggattccatgatcggcgagacgtatttggaggatgacttcaatatggcatcggtttccatgattacggttgaaaacatgtctacgcctgataccttaaaactgaaaagcgatcttgaaggggtcgaaggcgtacagaaggtcatgtggacgagcgattttatcgatgtgacgacgccgaaggaaatgcttccgagcgatattcagaagttcttctataacgattccggcgcaacgatgctcatcgttcagttcgatgccccgagcgcagatgccagaacgatgaacgcgcagaagcaaatcaagaacatcttgaataaagattgcttcatcggtggtatgtcggctattttggaagataccaagagcctcatcaataaagaaatgcccttgtatatcctttgcgctgtgggcgcttcgttgctgattctgttcctcagcctgaaagaaacgattgtgccgcttatcttcatgctcggcatgctgttcccaatcgtctataacttcggcacgaacattttcctcggccaaatcagctacattacggaagcattggcaacggtcctgcagcttggtgttacgatggacttctccatcttcctgctgcaccgttacgaagaagaaaagctgacggcggcatccgatgaggacgccatggtggcggctattaaaaagacgttttcctccattaccggcagctcccttacaacgattgcaggcttccttgccatgtgcaccatgcagcttacgctcggcgaagacatcggcgtcgtcatggcaaagggtgttctgctcggcgttatctgcaccatcacggttttaccgtcccttatcatgacgttccgtcgtgccattgaaaagcacacgcaccgcacgttcatcccgaagctcaagcgtacctcgaacttcgttgtgaagcaccgtgtgccgattttgattgcgtttatcataatctttattccgttcttcattgcacagtcaaagacttccgtttactacacgatctttgatgcgcttccgcaggaccttcccggcattgcgggtacgaaccgcttgaaggaagacttcgatatgacaacgtcccacttcatcattgtggacgataccctttccgaaaaaaatctctccgatctttccgatgagttgagcgacgtggacggcattcaccaggttttgagctatgaaaagttcgtcggcggcgcgatcccggaaatgtttattcctgacgacgtgcgcgacatcttcgaggccggcggccacaagatgatccttgcaaactcctcttataagagcggcagtgacgagcaaaataaccagctctccgaaatgatcgatattgtgaaaaagtacgacccgaacggcgtcatcaccggcgaaggcgcgatgacgaaagatttgatcgaggttgcggatgtcgacttcaataacgtcaacatcacaagtatcatcgtcgtgttcgtgatcatcgccatcgtgttccgctccgcttctgttccggtgctgctcgttgcggcgattgaaagcgccatcatgatcaacctcggtattccgtacttcaccggcacaacgctgccgtttatcacaagcatcgttatcggcaccattcagctcggtgcaacggtcgactatgcgatcctcatgaccacgcgtttccgtgaagagcgtaacgcgggccacactgcaaaggaagcggctcaaattgccgttgaacagtgcagtcagagtattttaacaagcggtctcaccttcttcgcggcaacgttcagcgtgtccctcgtctcccgtatggaactcatcggcgtgctgtgcaagctcatcagtcgcggcgcactcatcagtatggcagttatcctgcttgtgttgccggcactgcttgtcatcacggagccaatcctcagaaagaccacgttccattggctgaaaaagcccgaaatcaccgagaaaaaggcataatcgattcagagaaaggatctcgatcaatatgagtaagtatcttacaaaatccgttgcggctacgatttccgcacttctcctcctcggctgcgctgccccggccttcgcggcggatgctgccgttgagaaaaaagaaacctcttatctcatcctgaacgcagacggttccgtgcaggagcagatcaccagcgattggctgcacagcgatgacggttttgattccgttaccgacgaaagcggcctttccgatatccagaacctcaagagcgacgtgatgccggaacagtccggcaatacgctcaagtggacgacggacgaaaccgatatttattatcagggcaagaacagcgcacaggcgccggtcggcgtttccatcgagtatacgctggacggcaaggcggttacggccgatgaactcaagggtcagagcggccatcttgtcgcaaccgttaagctgacgaacaacaccggcgaagaagtgaccgtaaacggtaaaaagcgcaccgcctataccccgttcttcaccgttgcggcggctgtgctgccgagcgaaaacttcaagaacatcacgacagagcacggtcttgtggagtctgattccaaaacgcaggttgcctgctaccttgcgatgccgggcatgaaggaagccgtcagcgacctgctccccgacagctttgataagctcgacgacctgatgctcgatacccttaccctcgaagcggatgttacggactgcaccgtcccgacgtttctcttcgccgcggctccgaacctttccgacctcgacctcgatgaggtttccgacgagcttggcgacacgatggatgagttgaccgatgcaatcgatcagctgaaggatggttccggcgcactggatgacgctgtgggcacacttgtcgaaagccttgacacgtttgcttcgagttacagccagttcgatgccggcgtggacagcgctttgaacggcacacagacccttgcaaacggcacggagaacctgcttgaaaacgcacagctcttggcaacgaagaccggcgagctttccctcggcgctattcagctgcagaacagtaccgcacagcttgcgggcgtcatgaatcagcagcttgtcccgggccttgtagaggcttccgaaaagaaggccgcgcttgaagacaaaatgaccgagctttccggcaagctggagaccgttgaaatcccggatatgacagcactcaaagcacagctcggcgcaggtgctgaacaggtctttgacggtgcagcaagcggcgcagcgaaagcggcttccgaagctgctgcaagcaatgcagcaacggttgcttctcagaagacggcggaagagatcaagggcaacgtgcaggcggcttcttcctctgaagatgtcacaaatgcagccgcagcccttacgacacagctttatcagagcggttactccgcaggttatcagacttcacaagcttatgtggatgcggtgaaggcggttttagacaatggcggccttcactttacagatgaacagaaagaggctattttagctacgctcgaacaggcagagcaggcgtctacctccaccccgagcgccgaagtcatcggcaatgtgaccgcacaggtctccggcatggttacgaagatcgcttccggcatcgaccccgacgccatcgcatcggttgtcgcgccgcaggtcacggaaaaggttgccccggctgttacggaaaaagtaactacttccgagaaacttgcggcggcaaagcagagcgctgtgcagcaggttgcggcggcaatcccggacatcaacaccgatgagctcaagagtttgatgggtgaattcaaagacctctcctcgcaggcaggcgaaatgatggacagtgtcgatacgctgaccggcgcgctgtataacgcagagaatccggcagataccaacacggttgtcggtgcggccaacgcgatttccgacggtgctgcaaagcttggcagcggtgcttctcagcttgcaaccggcacctctgcattcgcaaccggcgtaggcacgctcgatgcaggcaccaaccaactgctcggcggcatggagacgctctcttcctccagcaagaccgtatcgaatgcgatcggtcagttccagtccggcggcgcagagctcaaggacggcacgtctgagcttagcgacggcatgacagagttctccggtacaatcaacgataagctcgacggcttcagcgaaattaccgacccgaattccatgctggcacgcgtgattgacatcatgaaggatcgtgcggacagcttcaagggctccggccgcgcagacggtacggatatgaccgtaagctacgtaatgcgcaccgcaacggactcgagcagcaacagcacgagcaccacggaagaaaccacgaccgagactgaaaccaaagacagcttctggaaccgtgtggcaaacctcttctctaagtaatttaaaataaagcaaaggaagcaggaacacatcgaaagtgctcctgcttcctttttattgcttttttcggtgaaacggtgtatgattatcgtgtttaaatcagcagaaaatggggttgaaaaatgaaaaaactatgcacgctgttcctcacatttttgaagatcggcgctttcacgttcggcggcggctatgcgatggttgccttgctggaaaatgaatttatcgcaaagaaaaagtggatcgataaaaaagagttcctcgacatgatcgcgattgcggagtctacaccgggcccgatagcgattaacagcgcaacgtatatcggttatcacattgccggtgtgcccggcgcggcgacggccacgcttggggtgtgtatcccttcgtttgtcatcatctacctcatttccctattctttgaccagtttttgagcttgaaattcgtttcttgcgcattccgcggaattcaggtgtgcgttgtgtacctcatcttttccgccggtgtgcgcatgctgaaaagtcttgaaaagacggcgttcaataccgtgcttgtcacaggcgtagcggtttgcatgatagcgttttccgttttcgctgtttcgttttcgtccatctactttattttgcttagcggtgtggttggtcttgcggcctatttcatacagcgcctgcatggaaaaggcggtgacgtgaaatgatctattttaaattattcctgaccttccttgagattggcgcagtgtcgttcggtggcggttacggcatgatctccctcatccgcgaagccgtgctctcgaatcactggctcacggaaagcgagttcatcaacttcattgcggtgtccgaatcgacccccggcccacttgccgtcaacatggcgacgttcatcggatcttcgcaaggcggcgtgttaggcagtctgctcgcgactttgggcgtggtgctcccctcgttcgtcattattttgctcattgcggcagtgttgagtaatctgctgaaatacgccggtgtacaggcattcctttccggcgtgcgtccgtgcgtggtggcgctcattttggctacggcgctgacgatgggcctcagcacgctattcggctttacgaccatacgaagcgcccccgaggtcgatctgcgcggtgttgtgattttgctgctgctgattactttgcactttggctataagcactttaaaaagaaagcaccctcgcccattttgatgatcgtgctttccgccggtctcggcattttgttctacgcattttaaattttgggaaaagaaaagacctctgctcgggccaaacagtcttgagcagaggtcgtttctgtacaaaaaatagcgtttagccgttatttcggctgcacttttcggcgtcgattgcaagcacgatcatcaaaacgcacagtgcgtctgcggggtcgtatatgttcaaaaggtacgtgtccgtccagttgaacagctctttggagatgcttgccacattgtgaccgcttccggaaacaacggtataatcccactccaaaacgttgccctccacatgccagccgttgcattccacgttgtatttcggcttaaaaagtgcaaattcgcggctgatgcaaccgacatattggtttttaaaatacatttcgaatttcggcatgaacgtgaagatgcgttcttttaccgtgccgatctcttcaccgtaagcgtcaaaaattttcaggcagtgtccccaggagagctgccctttgacgacatacaccgtgttgccgttctcatcgtaaatatcgtagctgtcgaaccatgaaaaaaagcgctgtttaaaccgtaaaatcataaaaaatcccctacttcttgccactgttttcaatcgtatagatcacacagacgaaccctgcgatgaccgcgagcagtatggagccgcttaacccgtcgttcatggcagcgccgaggaatagcccgactatggcggccaagatgattacaacggcggaaccgattgttttcatgttcacgacaaaatctcctccacgtacttctttaagccgattgtaccacgctgcgtgtcggtttgcaatagacttctgcaaagataaaagaaaagaatgcgttaaaagcaggttaaaaacatgaaaaatatccacattttttcgaattttctattgacatttcctttgcggttttatataattcaattgtaaatctgtcaagcgccccgcggtcacccatccttcggcccggggtgctatttttctgaaaataaaaaaggcgcagagcccgctcggaaatcccggcagccctgcgccttttgcaaatcggtctttcctgtttcttccgccgcgtcaaacttcgccgctttcgctttcagcgtttcgtagcacggacataaagcagaaaatatttgaaaaacatcgtttattgatacattagccccggcattttgactttatctcttccgtctgtgggcatttttaaatcgcccatgaggcaggcgtaagagatggcactcttgccaaagcgaccacgaatctcctccacagcatcctgtactttctccattgccatgcggtgctggacattatcaaacagcgtaagctgttcgacgctgtctttgggcgagagttcaatggaacggacggtgaccgctctgaccttcgtattccaagaataccgctctttaaaactccgaaatgcggcagcggcgatctccgagggaagctgtgtcttgaaatgtaaacctcaaagcagtttgcttcctgcacgctttctatcctgcggcctgtgtcagcacacatgctgttgtgctctgcgacatgaacggcagacaaacgccgctctcacctgcgccgaccagcagctccgtgccgctcgggctgatcaggaggggatacctctcacacagatacaccgggccgttcgtgacaccgtagctgctaccgcccacaagcgacaagctgagcgtcacatagctcggcccgtccggaatcgtttgaatcgcccagaaaccgctccacatctcctcaatgtcgtcgctgtcttcgtatgtccactccagatcgactgtaccccccgtctcatcctcgaaatagaagcgcagcgagaaataggcatagcggccggtttcctctaccatggtttctgtgatccagcccatgcctgtactctgcgatccggcaaggccaagcgcggtcatgcctgtccagccgtcagaaagccaaccggcaaattcggatgggacgtcataccaggcatattccgtaaaatcgaacgaaagataatcaccggcttccgatgtacacggtgcaagatggctcgtcgcatcaagcgagggataccattcgcaggtgttcccgctgttgtcggtgataaagacctgggtgtcggccttatgcgcaatgccgtcaagatttgcaaagagcagcaccggttcgccgctctctgaccggtagagaacctctgtgacctcatcggtctgtgttttttcgttccattgcacacggttgattgcaaccgtcgcgttctcgtcgaccggcacaatgcagtacagatgccccgcgctgccgataatgtgctcatcgttgatctctgcgataaaggggtattcgaggagcattgcctcattggtttcctgcagccacgcagggaaacccgcctcgaaaccctcatcaaacagaccgccgacatagccgagatacgccgcaccaaacattgtcgtcggaaaatcaatcctgtctcgcaaccatccaagcgatgtctctgcctcctgtgaaaacgcgtattgcaccggcggcgtgtccacggttttatcctgtgatacaaaatcgttcccgtcgctctgtaatacagcttcctcctgttggctttccggagtttttttgtgggcagtatttattttgggttcgtcaggctccgtttgcgtcttctgtgtacaggcgcaaagcgacaataacagaaccagtgccagcaatagcgcgaacacgtgtctgggtgttgttttcatagccactcctttcagaattttccgcttcggccggaaccgcctccgccggattcgctgtggctgctcccgccgccggaagagctgcgctcaatcttccggctggaggtcgtcttatgggtaaaatgatctgtttgctctgtaagctgaagtcccgcggaaacataggcgttagcggttgcttttttcgatacattttccattttctgccatatcacagcgacgatcacggctgctgccagtagggaaagaccgatcacgataaggattggaaaaaacaaactcgctcgaaccggctttcctgaggctgctttttccagatagacgctgcattctttgatgtaatcctcaaagccgccgtaccagtcgttttcaccgaagttatcgaggaataccttttccagtttctgctgaccatagctgttgaacgcatactcgcagcgtgagccatagcagaacatcgcccagtcgcgatcatccatgctgagcaggagcatgatcccgtcgcggtccggtccttcgcccatcgtgtattcgtgatagatggtataggtcgccttatagacaccttcagaatggaagtcacgataatcctccacggttacgatatatacaccgatgtcgtatttttgggagacggtttccgccatcttttccagcatcatattttcgttttcgctaagaagtccagcctcatccgtcacataataaagctgtgcacctgtctgctcggttgcggatacattcacgcagaatacaagcgcgattataaacgtcagcaggagacagcgtattctctctttcatttttccgccctccctagtgtgccaaaagcagcagcgcagtcacgccgatggcgctgagtgacgccgcgattgctgcaaacaaaccgacaacccgcttcgtgctgacaggaaggttgcctaccaacttacctgtctgaccattcatggcaaaaaggaaatcttttccttcccactttgtattcaagatccagacgggaagcaacgcgtaatgcactttgccgcgcttcaaacagatgtctcggctcgtttcattgcaggtggtgtaattcgaaaccgtgctttccagcgcagacaccagcgaacccgcgcagcgcttgtctgcccgctcccggctgttttcaacgctcacatcatatttgtctgccaaaaatccgggcagatacgccgtggaaaacggctttaagtctgtatagtcatacggttcgatggaatccatgtagtcatccggcattttgcttgacgcgtccaccgggattttctcaaagccaatagaaccggcgcggcgcacatcgtagtggcttgtctccgtgatttcataatctcccgaggtgtacttatgtacagtggtagcatggaactgcacgcttccgctggccgcaccgtcatacatccagaagggtacatacacgcctttgacctcctcaagatgattggacttggagaacgttgacggcaacagcggctttttgcgatagtgtttcttcagcgccttgatggcatcttccttgctcagcttaaagggaagcacaaaatcaggtttcaaaacgccggcgaactgacccggaagcaccgacggatttccgcagtatgggcaggacgtagccgcagttgtcgcgtcgcagagcagctccgcaccgcacgacgggcagctgtaagccttcatgtcagccgcgtccgcgccccaatcctcgttcaggccggaagtgtcccagtcagagccgcctgcggcggccttttgtttttccgcttcggcagatttttgagccgcttctgtttcttcctgcttctgcgccgcttccgctgcttttgtttctttttccgcgtagagcgcttcaatttctgcgacatcgaagcttgagccgcagtaatcgcactccagcctgccggattctcctacaaaatggagtggtcccgtgcaggcggggcattgataatttgtgatttgtgttgccatctaagttcctcacttcccagttggcgttacagcccgcaagcgcagtccgtagtgccgaacacagttataaccgcattttccggatatgtcccgcaaactcactgtttgtgataaattgcatccgtgtcctttatgacgttttcttccgaatcgtacaagatgcgcatatcagccgctgtatggtcactgttgacaagtataacggtaatcagcttttcagccttttctgcaatttcgtcgtaaacgcagtctgcatcgcaaccaaagtcaaagctctttgtccggaacgcggactcggcaaaaatgctccagctgtaccattcttgtgtctcgttgttccaccacattgtacaacagttcataccgcttttgtcctcatttgcgacaaactcatatttttgcaggccgtcctccgtaacccacgtgccttccagcaacgcaaagacctcctgtgcttccttttggctttcggcttttctgtcggcttccgcttgcagctcggccgtactgtaatacgcttcgcggtctcccgtttcgctccagccttcatcgtaccaaaacacgtctgccagccatgcaaactgcgaggagtccagataacgcagacgatagatgatatcgtgtgccctgtcctcgattgtcagcccgctgatcttttcggcaaaatccgcctgaacggtcagaacaccgtttcggaacgtatggtcaaactgatcgcctaaatcttcaaaattcgcgtcgtagcagcggatgggattgtctttgaactgtacgccgcgataatagagcctcatcgtcccttggctgtaaatggtttttgtaatgtggaaatcgtcaaaaaggaccgatgtttccgggtactgataggtgcatccgtcgatctgaccgcaggaggtcagaccgagcaggctcatacccagacctgctgcgatgaggagcgctttgaacttcaccgcatcacccccgttttttcgcgaataaccggattctcccgctccaagttggagcgggagccgttttttattggaatgtcatattgttgagaatgatatccggcatcgttcccggtacacagtccatatcccgaaggccgatggaaagggcacggccgtcgtcaagctgcgcgatatactggatccaatcatagccgattcttttgtaggtgcggccatggaaggtgatgccgccgatcacgcggtcctcgatatccttgtagttttcgaagctgtccttgtaggaatcaaatttttcaacgttctccctcacctcaaactggatggcgcccgcaccaaacgctgtgggatcgtcgttttccaccaggcagcgcccactatcatcgaacgaccagccggataccgggatcttcgtcatgatcttgaccttaacatcgtcttttgcaaactgggcgatttccgcggagaagtccttcatctcggcgtttgcagatgctgccttgttcgcctcagcggcctcggccttcacgatgtccagatacttttctatggcttctgtgccggagaagccgctggtgttgtacgcactcaccgtataaacgcccggagtcttttcacggaagttaacgtagatgaaatgcgagctgtcttcactcgaaatccacttgtagtagcggtagttcgactgcatgtggtcgctgtactcttccttgacaaactcgccttctacgccgaagtaggcaacgatatcatcataggttgcgtcaaaaatattattattgacctcgttcatccaaacgtagcccttttgcacctgctcctcagtcacgatgccgtttccgccgggagctgccgcattcgtctggttggtcggagcattcccctccgaaacaccttctccgatggcatccggcatagacttgcctgcgtcaatcagaggcagataccagtcggtataccggtagggatacgcatcttcctccatgtctttccaataaagaccccacgggcgcagataaatgtcatagtggaattcgtcatcgccgtcttcatagtcgccgctgatacagatcatatcatcgtagtccaaaagaccggggtcaacgatccaatcggcatgctccagtgttacgtttgtaaaccagccaccctcggacatcaccgtaccgtgctcgccggttccggcttcactcagactgacctgcgcggaagccatagggtcggatctcgtgtagtcctcatcccaaagctcgattgtgcctgtgtagtctgtgtctaaatcaatgacgccgcagacatcccaccagtcgccttccatgctttcataatcgccgtagcaaccgctcatcttccaccagccgtaccattcgccgttccaccaatcgagcaatgtgtctccggtcgtattggaggtctccggttccgtatgggagactgtttcccggctgagcgtagccgggtcaacagtgattgtaccttttttgctgccgagaaattcctcaaaggtcgctttgacttcactggtcgtgtcttttagcacgaaggccgtccgcacttccagcgttgcacccggcgcaacatccgtaaactgatcgctcactacggtttcaaggttctcatagtccgtgataatagatgcaggttccagctctacaccgttttgcataaccgtctcatcgacactccagagatatgaggcgttttccttgctgttgtttgtgaagtccagtgtcagaacgattgcgtcgtttccgtccgaatcttccatgatgcatgcgcccttgtagagcagctcatagtcaccgagcttgattaaattggagtctttcccctccttatcctttccgcaggcggtgaggccgctgagcagcatcagtgccgtaagaatcaggcatagaagcttggtcttcgtctgtttcataatttcctcccaatatccttcagggttgcacaaatctgccgatcagcagaaaacaacgtataatcccggcaaaaaacagccgtgcctacctgagacattttttcttatttcttttcgcgccggataaggtttccgtccttgtcggtaaacttaccgcagagaatcttgataaagtcgacaaggtatccgatgccgaacagaccggccgtcagcgtgtagagaatgcctgtgccaatcttaccgacatagtagcggtggacgccaagaccgccaaggaagaagcaaagcaagaatgttgtcatccagtccttcgtttcgaccggaacctccggcgcaacatagtcctctactgcctcaccgttcaaaatcttcttcacggtttccgttacggtgtcgatataggcgccacgctccgttgcaagaccgaccgtcgcacccttgagacccttgcgcagtgcgctgttcttatcaacgcgcataccgccaaccgacatcttggcctccgtaatgaccggctgaatccgaatgtgtgtgccatccttgaggtaaagccagaggccaacgtccacatttggttctttctcaaacgagatgcgctgtccgggaacgccgcctttgatctggaatggcatctggaacgctgctctgcgcgcattgagtttctgcatgatttcttccagtgtggtagaatagggaagatcaaattcacggggactggtagcgaatgcagagtctttcatgctgcctgtaaggttattcatcgttttttctcctttctaaaaggtcagagggcggatagtgttaatggtaagctgcacggctattttttcgtaaaggtgccgctgatgccgtagccggaattctcattcatggtaaggctgtttccatctacggagaatgtataagtagatggatcactccatgcctccagtgtcaccgtaagctgatcaccttcaatggtgtacgtaccgtcctgtttcatataagcattttccatggtgcatttgccgcttccgttgaatgtccatgtgatcgtaccgtctgcgccaagttcggcggaccatgttccggctaacgcatccttgctaccacaggcagaaagtgttagaagcgtaaccacaatcagaagcaatgctacaaactttttcattattttgtccttctttctttcattatcatttgatggatatttatcctcttaccgcgccaccgcaatattcacaacagccgttcacgtccggtgtggtcgttgcgccgcagtagggacaggtgactgccgttttgggtgcggcctcctgttcaatctgctggcgcacatccttgcggacctgcgtcagaacctgccggatttcctcgccgagctttttgcaattgcggtactcaacgttagtctccggattgcatcgggtcgtcattcccggtcgcattgcggggggcggtgtaatatctacggaaccggaattgatcttgaagcgtatttcgtcaaagtaatcgttgttgacgaatatggtgatgtagaaatcataggagtattcataccgcgggggattgtagctaatctccctcccgtccttatcctcacgcttaagctccgtgcggctctcgtcaatgtcgagattacagccggtcacgtctgcaaaatccaaaacatccgggttggcttccacgagatttctggcacgtgtcaccatgaattttcccgcgtcctcgtcaagaagcaccttggtgtccgcgccgagcgttctggttgtgtggaatgccgcgacctttttctggttttcttccctgtaatcaagctgtgccttgatttcctcaacagtgctgttgcgtcgatcagagaaccaaggggaaagcttttgggcgcagtttttgcagagattgccgttttcaagcttgcggttgccaagtaaccctattttttctccgcaaatatcgcaatattttttatcaaacagtcccatatatgtatcaaactcctttgtgtatgctacttgaattatacggttactgcgtgtctgccttggaattgagtaccgcaccgtagatatacaaggccggaatagctattcctgtcaggatgcttacgacattaaactcgccgccgttgaccagactcatcacaatgctcaatacgctgaatacggccacaatcgcgccccacacgatgagctttcctgctttttcactgcgcttactgtgcttaatgcctttgattccggcaatcatctggcaaattcctccgaccagcgtcaggatcaacgccgcccaatatggaaatgtcagaccggattccgcaccgagtcctgccgccaatacacccagtccaccgacaagaacacccgcaatgatggaaaatactgcggcaatgatcatcagaattccggtaaccttcaaaaatttatgtcctttcatggtaaatcctcctgttacaataaatcgtatggtttgtttttattctttcgcagggcgtttggccccgcattctgcgcaaaatgtacgactgccgtttggcatacctcgcattactccgtttcaaggtttgacgtggcataagcttcttcggcaatactcagcaccaaggtctccagcgcttctgcatggctgccgctgagcttttgaatctcgttcccgtcatcggtgcgccaaatgacccggatttcgctgtcggtttcgtcctggacatttggagacggctttcggtacgcgggcagatccgactctgccagcatattctgaagttcaaaccattgcacccacgtaagctgccaagggattgggttggaaaacgcatccgtttcgctttctctcatctcgtcgccggatcggtccggaaaccggccgatcagcagaggcatatccttctcccggtagaatttcagtgaaaagcagctgtaaaaattcctgtggttctgtcgccactcaaattccaccagatcttttcctgctctgtatgtatccgggttttccatcctacctccatcttgaatccggctatcgacaaaataccgatacagtgatacgcccgccagtgcgataaacacaaccgccgacgcgatggtcagagcgattatggatgcttttttcacttcaaatccccgtcgtcaaacggatcgccgcattccgggcagaacttgggcgggtgtgtcgggtcagccggctcccagccgcatttgtcgcatttgtactgcggaacaccggccggttttggtttgccgcattcagcgcaaaactttcctttgttcaccgcaccgcagctacacgtccagccgtttgcctgcgattccggctttttggtgccgcattccgggcagaattttccgcttgccgtcgcgccgcactgcggacaattccagctttcggcggcaggctttggttccggctttttactgccacagttcgggcagaattttccggtaataccgctctgtccacacgaacagttccatccttcagcagctgccggagccggagcaggctgcgctgcttgctgctgtgcgcccatctgatagagattctgcgcgttcatgccgcccgcctgacctgccatgttcatgcccataaacgccattgcagggcctgcattctgattcgacgccgcagattgcatcgcggaagcctgtgcaccgacaagataggctgccgctctcgtcggatccataaacgccgcattacgctgcagctccttaatcatctgctcatcctcttcgctcgccttgaccgacgaaacgccaaaggaaacgatctcaagtccacgcaggcagcgccattttccggataaaacttcattcaatgcctcggccagttccattgtatgaccgggtagcgcggaatagcggattcccatgtcggaaatcttcgcaaacgcaggctgaagcgccgtcaaaagctcggttttcagctgaccgtccagacggtcgcgggtatagtcttcactgacgttgccgcatacgttcgtgtagaacagaatcgggtcactgattcggtaactgtactcgccgaagcaacgaatggcgatgtcaatatcaatgcccgcgcgctggtcgacaacgcggaacggcaccggagagggcgtgccgtacttattgccaatgagctctttcgtgttaaaatagtagacacgctgatctttgggcggctcgccgccgaaagtaaagcgtttaccgatattcttgaacgtatctacgatgctggttcccaactcaccggagaagatcgtcggctccgtcgagctgtcatagacaaactcacccggcacggcgcaaagctccgcaaccttgccctgatcaacaatgatcatacactgtccgtccgccaccgcaacgacggaaccgttcgagatgatgttttcgcttccctttgtgttgctgctgcgtccggaaacgcgccgctgtcccttgaccgccataacattttccggaattgattcacagtaaaaatactctttccattggtcggccattacgccgccggccgcacccaatgctgctttaatgagtcccattttctgtactccctttctttacttattatgcccacggatcttccgccgcgggaatacggataccgctgagaatactggaatattcccagaggaaccattcgccggtcgaagccttctgccgcaatttcatgggacgcggtgaatccgcgccggacgttttaagaaacacgcgcatatagcccggctctatatcctgaggtctggggtctgccagcacgttcagcgtgtatggcacgcacggctgatacccattttccggcgttgcgccttcaaaatatgcaagcggcagatagaccttgccgcgcaatcggtcgcgcagaaactgacagtcatacggtgtcatgggcttaggaccgcgcagaaggttcatcgcagcaacgcctgcatctttgtccctgtcaaacaacgccaatgcacacagaaacagtgcgcagatatgttccggctgccgccctttagcggcaagaatttcaaattcctgcaaattttccggaattttctgaattacaacctgcaacataaccactcctttctaaagtatatcaatcacacctgtggaatatatcggtaatcccaatgtgtaatagaattatcaatctgccaatctttcatgaacggtcgctccttggcgggacgcgctgtacgctgagctaacctcttcactatccggaaagaatgtccgttaaacctgcctttttttctttctccaaacgagtagaaaaacgacggcagcaacaatcaaaagtgttggcacaagtgtgaaaacaaggatttttcccacggagaagctgcgctctgctgtctgcgcattgttcttttcgtacttttgaggaacatctttaccgacagcgttctcaccaaatccgctcttttctcccctatcgccattctttccgtcgctatccgctgtccccgaaattgatgcgccgggtgaagccgtaggcgaaatacccggtgaggccgaggcagctgcattaggcgacgccgtgggcgaggccttcggcgtggctgtggcggatgtgcgtggtggagccgtaggcgaaaccttcggtgtggctgtggcggatgtgcgtggtggagccgtaggcgaaaccttcggtgtggctgtggcggaggtgtgtggtggagccgtaggcgccggagtcggtgttgtgctcggagctgcagtcgttcccggtttgagcttgggaattggatttgtgcgtatcgtgccgcacatattgcatatccattgcataactccctcttggcttgttgtcggttgtgcgaccactttcccggcgtcccaattgtgatccgtcttggcaatcggttttgtctccgttacactgcattgcgtacactcccgcttttggatgccgatctccatgcaggtaggctgcgtcgtggtgaaccacgcaccgaatttgtggtccgtcttggcaatcgattttgtctccgtcacactgcattgtgtacactcccgcttttggatgccgtttgccatccaggtgggctgcgttgtagtaaaccatgcgccgaatttgtgatccgccttggcaatcgattttgtctccgtcacactgcattgtgtacactcccgcttttggatgccggtctccatgcaggtgggctgcgtcgtagtaaaccatgcgccgaatttgtggtccgtcttggcaatcgattttgtctccgtcgcaccgcagcgcgtgcactcacgtttttggatgccgttcgccatgcaggtaggctgcgtcgtggtaaaccatgcgccgaatttgtgacccagcgcagacattgtgacggtgtctccttccgtaccgcagtcatcacagataaaacgggtgtatcctgaagtagtacaggtcgcgaatacgcggttatcaataacccaataatgatccgttggcggcgcgggcatttcataccacttgttgcatgtactgcaatacgctcgcttcgtgccggattgtgtacaggtaggttctttaccctgaacaacttcccacggtccaaagctgtgaggcatggcagggtcagtttgataagtgcatctcatcccacagacggtacattccagtacatagtatcctcccatcaggcaggttggcttttcctcatcggtctgtataatgttttcatgatgttccggattactgtcttccggcgagcacgcaagcgcggtaatcgcggacagcgccgccatgagcgcaaataccagaaatattagaatcaatcgcagtagttttttcatttctcacccatcctttcaaagcgtgtcaattacgcccgcgaggtaagtcggcgataccgatgcataaataaagttatcaaccagctgatcctttaccgcctgccgcacttcggaggcaagcagtttatccgcgtcctcatccaccaaaagcagaaccttacacgtccaaccgagttgctttacggcactgcagatcttgagtctctcactcagcttccagattccctgtcggatgacctccatcaccaacacattggcacggcaggtccggcacaacgccagcgtttcttccggctttgaagaacggtagataaggaaatccgggtcgcatcccgaaagtgattgcatgaccgcctccgacagaagtccgcccttcatatccaatacaattcttcgcatctgtgcttttccaccgcctttctcttcctttgaatccttcatctatattttagccgttatcttccatttccgcccccgccaattggataggatttgtaattattttccgttgcaaagcgaaattttgtaacagttctctgtataaagaggacaaaacgtgttgtcttttgtctatccgcatgatatactatccatataaatatactgattttttgggggcatgcggcatgagcaaaacgacgaaaagaagccttttgtacgccttgggcttgctggtgctcattgcgtttgccatgtggctccgctatgcaagccggtattattttcattctccggctgccagctacctgcgaagcgcaatctatttgtttttgttcagcgtgtggtgctactctctttgggcgcgcatcgtacaggtgcaggtgcggcactacatgctggcgatttcggcactgatggtgctgtggattctgctgcgctcaatcaagttttccattgataacacggatgcagaacgcctgctgtggtatttctattattttccgatgctgtttatccccatgctgtcggtcttcgtttcccagtctctgggcaagggagaggattttcgtctgccgcgatggacaaagcttctgtatcttccgacattgctgctgcttttgctcgttctgaccaatgatctgcatcagcaggtattttctttcccgtccggcattttatcggaccgggagtatcggtatgaggtcggttttttcttcgtgctgggctgggagactctgtgcgcagggtttgcgtttctttcgatggtgaaaaactgtcgtatcccacatagcaggagaattcgctggttaccgctggttccgtttgcgctttcgctggcatatgcttatatgtatgccaaaaatgtctattgggtctgggtgctcgcgggcgatatgaccgtgtcacagtgcctgatttttgcaagcatccttgaatgctgcattcaaagcggactgattcattccaatctcggatacgatgagctctttgaagcgacgagcctgcctgttcagattactgatcaagcgttttgctccaaatatgtatctgccgccatgcaggggactttgccgcaaagtaagctaaggcatatacagcaggataccgtctatctggatgacgatacacttttgaaacggcataagttgcgccgcggctgggtattctggaaggaggacatctcagcgctgagtcaggttcaaaagaaactggaattgacacgagatgagttgcatgacaccggcgacgttttggcggcggagaatgcacagcatgcaagatggttgaagctgacggagcaaaatcgcttgtatgatatgatggaggcgcagattgatcggcagatcgcgatgctgtgggatctgctggctgaattgcagaaaacggaggaccaaaaccgggccaggcgtttgctcgggcaggtcatcattatcggaacctacatcaaacgcagaagcaacctgatttttgtcggcgcacagcgcggtgcgatcagtgtgcaggagcttcggttatgcctcaatgaatcttccgagaatatctgtgtttatggcgccgactgtaaggcaattgtcaagggagaagaccagcttaccctcgaacaggcgacgcagatctacgacctgttcgaggccgtcgtggaaacggaactggaatcccttcgtgcaatgctgatctccatagatgtcggtgcgcaggtagaagtgtctttttgtgtttcagcggcagagccgctctgcgggctgcgcgcgcattttcaaggtttggaatgggagcaggatgaggacgggctgcaatatgtgacgcggaagctggaaagatcgaggaggtaaaggcgcatggataggatcaaggaaagttttgacagtctccccatcgcggcctgctttttcgataaaaacggcgtggtgcggctcatcaaccgccggatgcttgccattacgaactggctgcaaaaaggcggtatacagtcgctggcagagatgcaaagcgccctgcaggcaccgccggcaagtgtgtgctgtctggatccgcacctttggatttaccgctttccggacggaacagcgctgcgctttgcgcaggagcagatcacaacaaaagcaggtgcccgatatacacaaatcactgccgcagacgttacggagctgattcagaagcagaaccagctaaaagcggaaaatgcgaagctggagaaaacaaacaagcggcttaggcggctgcttgcgcagatgccggagatcatccgggaagaagaaacgctggccatgaagctgcgcgtgcacgatgacattggacacagcatcctcgcgacgcggcgcgtgctgctccaaaacacagaccagaaggaaattcgtgcaaccgcagcgttgtgggagcagtccatttcagtgctttaccgctccagtcagatgagagcgcaatccgaaccgttggaagccgcaaaagaacgagcggaaaagcttggcgtcagagttctgctggcaggagatgagccgcgaacgcagcgtatgcgcgcactgattgcactggcaatcagcgaatgtgcatcgaactgtgtccgtcacgccgacggaacagagctgtatgtgtgcttttggcaaaagccggattgcatagcggtctccctaaccaacaacggtgcggcaccaaagggaaaaatcacagaaggcggaggcctttctatgctgcgtcaacgcatagaagaatccggcggcaaaatggagattcagagcgtccctcgctttaagctgatgctcagtttgcaggaaaaggaggaagcagcatatgaaggtgatgatcgttgaagaccagaccatgattcgcagtctgttggaaagctattttcgcgccgaggacggataccggatcacggcgtccattccgggcgcgaaacaagcagtcgagatgtgcaggacaaattctgtcgatctgattttgatggatgtgcagacagagaaccgtgagaacgggttgattgctgttcgccagattaaagctatacagccgaagagtaaaattattgttgtgacttcgctgatcgacggcgccgttctggatgaggcaaagaaggccggggccgacagcctgtggtacaaggactcgacgcagaagcgcttgatggatgtcgtccggcaaacactggagggtgaacatatttttccggacgcacctccgacagttgagatcggcatggcaaaaagcacggaatttacaaagacggaactgaaggttctgcggcatctgctgcggggactgtcttacacgcgcattgcggcagagatgggctgcgagatgtcaacggtcaaattccatgtgtcaaatatgctgcaaaaaaccgggctggaaaacaagcttcagcttgcgctggccgtcagcgacgtcaagttgattgccgatctggcggaagaatgatgggatttgattttctgcttgtacagccacgcaaaaaacacgaaccccgccgcagaattgctctgcagcggggttcgcttatgtgctgaaacggtcgaaaatccttgttttaagcggttttcgggcatagaaaaagtccaccgtaattctatcaaaattacggtggacttttggcggagaagatgggatttgaacccatgcgccggttacccgacctactcccttagcaggggagccccttcaccacttgggtacttctccatggtgaaaataaaagaaaaatgtggcggagaggaagagattcgaactcttggtcccttacgagatcactagttttcaagactagctccttaaaccactcggacacctctccatttcagaacaagtgatattataacacacaaaacacactttgtcaagcatatttctttttgtgcatttcgcagagccgacttgactgttattaattatacaaaaactgagtaggtttgtcaagcccataatggaattttgaccatttttttccaaaaacaataaaacagccaaagaaaagcgcttgcaatgcgaagaaaaatgccgtatactgtttatgaaaaacaaaaggagtcgttgtgaaaatgagcaaggttgaatttgattgcggtaaatggctgcaggaagccgaagaatttgcactgccgaattggagcgccctcccctctattcccctttatatggatcaggtgatgatgtttacaggtgaagcgctgtctctttttgaacgcgatgaaaagcagagtttattgacgaacagtatgatcaataattacgtgaaaagcggcgttgtggatcatcccgtgcacaaaaagtacagcaaggagcatctttctaagctgatgatggtgggcttgctgaagcaggtgctttccattcaggatattgccgtgctgttttccggcgatgaagacgcagagcagctttataaagactttgcggcggcgcagagcggcgctttgcacgagacggcagcgggcgtgcacccggaaagtgacgcagcggccttgcgtgcagcggcgttgaagcttgcagcggaagctacggcgcgacaagcggttgcccagcgcattttaatggcgctgtccgacgaaaaaaaagccaagaaataatcaaatttgtaacgaacaaaagcctgcatggcgcatagaatgttctattcgaaaaaaggatgggatataatgtgcgatttgcaggcttttcctatgcgctccggcggccgattgctataaagtgcagctgttgctctaaaaatacggaatatcctcctcttccacgcgctgtacttcggcagtgacgtgaaaggtaatttcggcttttgagagcttttctgcgcggctttcccccatttcacgccacacatttggcgcggtgcagaaaatgacttcgctgagacctgcggcatcggctccgtttgcgtttttgagataagcggcgaggcgttcctcagtgcagttggcaagggcagtctcaaagcgcggaaatgcttcgttccctacgtgctttgcggtatttgtgacggcagaaacttcggcgataacatgaattctggcggtaaactcgggctgttctgctgtgcctgtgaagataatgttgctgtttgtgctgcggactttaagcgataccgtgccgaaagcttcgtcttttacggtgaattcgccgcccgaaagtgtaccctgcaaggcactaagcccctgtgtttccgccggcgtgagcacggcgcacaggcggtagctttgcagaacggctgtgccgacgggcgtgggcaaatcatcggcgcgcagaacgggcagcgcggcagtggcgtttacgccgtaaagaccgtttacaagctgcagcaaattcacgtctgccgcggcctcgctgtattttgcgccgtttgaaagctgcatgaagcgttcggcggtgagatccctttgtaacaggacgctttcggcggtatcttctgcgaggaaaactttggcggtcgggcgggaatcgtagtggcggataaagaaatccagttgttcggcgataccgctttctgcgcattgcataccgaaaaggatggcggcgttgtgcgaatacagcggcgtgcggccgctttcgagcgcgatttgactgagcgcttcggggacggtatcgccttcaccggaaaaggtgctctgccctccgtcctccgtcgtttcggaagcgagcaccgtcacgcggcagccggttgccgtgcggtctacgccgattgcgctgatgagcaagcgctcgtaaagctccggcgcgcagcccgaagcggtgagcgtcaaaatgagcgaaagtaaaacggatgtgagtgcttttttcatgcggcgcgtctcctcttctttttgatgcagtcgaaaaaccaaagcaaactcggcagcatagcgccggtcaaaacggaaaacggcagcagatacgctgtgcggaacacggccccgacgcgtgcggcggagtctgtgagccatagggacagaactgctgtcagcgcggctatgagtgctgtcagccacgcgcgcgggcgtgtcgggataggtgtcatgcacacggcgatgcagaataatccgcaggcaatacgcacgatgagcgccatcatgctgatgccgatgaaaagcgcgtccagccgctgaatgccggcaatctccgcgatggaagcgagcgtgtatgcggggaaaacttgcagcgcggcgtactcgccgagacacgagacgatgaaaaacagaagcacacccaaaaacacggtgatgccgccgttccaaacgacaaagccgagcacgcggtggcttttaccgctttttgtatccgtacttgtaagaaacggcatcaaaacggcaaactcggcaagcgaagaacagcgcgctgtgaagacgagaaacccctgtacggtttggtctgtgccgtcatagaaaagcggcatgagataatgcggcgtgacgttcggcgagacggcgagaaaaatcatccccatgccgagcatgaacagcgtgaaaatgcataccgaggcgcgcgagatggtttctataccgcgaatggcaccataaagtgcgatgccgagcacgacaaggacgatggaaaaacgcgaagcgactgggtctgtagtgttgacgagcagcgtcagaaaaagcgaaagactgaaaatgttcatcactataaaataaagcgcgtaaattgcggacatcggtacagaaacaccgcggccgcagttattctctgcgatttgcagaagcgatgcttccgggtggcttttgtgcagcacgaaaagcggcagagaaaacaccgtaaggtacaaaaacagcccgagcgaagagaaaatactttcaatcaaattgctgccgccgacggtttgcacattgattgtgatgctgacgatgacacgtgaaagaaacagcataaggtaaagctgcaaagcactgatcttggttttcacaggtgcttttccccctttcccgcgccgggcatgtgttgtacgaaggcgttatgacgcactaatcgtttccatcccgcgcgtacaagcacatcccgcatggcggaaagccgaaatggtgcgaccggggccaaaaacggcacggaaaagcttgttttgccgcaaagctcgaataataaaaacgtaaagcctgcaagcacgccccacacaccccatataccgcccaccaaaataaaagtaagacgcagtacagccatgggctcgtataatttcggaatcgtgtacccggtaatgaccgtgacggcgatgacgacgagcgacggtgcgctgacgagccctgcggaaacggcggtctcgccgatgacaagaccgcccacgatgccgacagagctgccgagcggtttcggtacgcgcagtccggcttcgcgcatcagttcatacataaagtaaagcaaaatcgcttctaacatgacgggaaacggcgtactgcgctctgcctgtgcaatggtaacgagcagtgtttccggcagcagctccgggtcgtgtgcggcgattccgacatacagccccggcagaaaaatcgcgaggaaaaacgcgatgtatttcagccagcgcgtgaacgtggcgtaaaacggacggtttgcataatcgtcggcggtctgaaagttttcaacgaagagatacggcacgtaaagcgctgtgggcgtgccgtctataagcaacccgatgcgcccctcatgcagtttgccgcataaggtatcggggcgctcggtaaaacctacgcgatcaaaaatcgcgggacgttccaagtaacccgccaaatatcctgctgcgagcacgtcttttagattacatgcggaaagccgctttttgagtgtgttaatgatcttcgggtccgcgatgttttttaaatagcacagcgcagccggtgtttggctctcttcaccgattgtcatcttttcaaatttgagttcggtcgttttgagacggcgtcgtaaaagcgaaatgtttgtctggtaggtttccacaaagccttcgcgggagccgcgctgcataacttccgtatcgggctcatccaccccgcgcgcagcaaagccctgcgtgccgaacgcgagcgctgtcggacagttatcgagcagcagcaccgcaaagccgttcatcatgcgttcaagcacttcgctgacggtggaaagctcggcttgctctacggcgcacagcacgttttcttcgataaacaaaagtgtttctttgccgttatccgtcggaattttcgcgcgcatcaacggatttaaaatgctcaaagtaatgtgctgcttgctgacgagcccgtccatggtgagcagcgcggccggtaccgtgccgaccataaattcgcgctcgatataatccatggcgttttcaaataatccatttatatatgttacgttttcctttaagtgttcagataagttttccatcagcagtttcctttccgcatggttctcctgtgtagattttacagaaaggccgtattttatacgcccgaagacgcataatagcgacgaagacatacggaaaggaaaacgccatgtttatttcgtttgtgcgcacaatcatcttgtattttatgattattttggccgttcgcgttatgggcaaacggcagatcaatcaactgcaaacgagtgaattggtcgtgacgctgctcatctcagaccttgcggcgatcccgatgcaggacagcggacagccgcttttcagcgggctcatccccattttggtgctcatcgcgctcgaggtgctcgtttcggttttcatgcttaaaagcagccgttttcaccgtttggtgtgcggcaagccggtcgtcatcatcaaagatgggcgtatcattcaggaaaacatgcaggagctgcgcatgagcgtagaagacctttttgagcaactgcggcaaaaggatatttttgtgctttcggatgtggcatatgccattgtagagacgaacggcacgctgagtgtcgttaaaaaagccgccgtcgattacctgcgtccgagcgatatgggcgtgaaagtgaaagacgagggccttgaagtcgttgtggtgagcgacggagacctttctgtgggctctatgcacttgtgcggcaaaaatgaagagtggatacacagcatattaaaaagcgaagccgtaccgctttccgaagtgtttattctaacggtaaacacagccggccattatacgctcattcggcgggacggcagcctaaaaaagggagtgaaaaaatgaagcgcatgaccttttcaatcgttttggcggtatttgctgtggcggtgtgtatctttggttactgcaacacggcaagatctgcgaatacactgattgtgtccgcggaaaatatcgaccggctgctttccgacggcgaagcggaaaaagccttggaggaaagccgaaaattgcaggcagactgggagaaaatacacgataaactgtgcgttttcctgccgcacgagcatttggagccgctggaaaacatttttgccgtgctgccctattatattgagcaggaggaggtgtccttagcgcgcgccgaatgccagatggtgaaaaacacggcggagcacattcaaaaaacagagcgcatcgcatttgaaaatgtgttttaaagcaaaaaacagcagccccatatcgcgttgggactgctgctacataatctgaatttatcggttgcgctcggccttgatcttattgagctcgtccatgaacgtattgatgtctttgaattcacggtaaacggaagcaaagcgaacataggcgacttcatcgaccttcttgagcttatccatggcataagtgccgatgagcgtggacggcacttcgcggtcgagcgagttttgcaggagcgtttcaatctcgtctacgatgcgctccagtgtttcaagcggtaccgggcgtttttcgcaggcgcgcagaaggccgttcaacagcttgttgcggtcaaaagcctcgcgggatttatctttttttacaacgaccaccggcacagtctcaatgacttcataggtcgtaaagcgttttgcgcagtttaagcactcacggcggcggcgaatgcgctccccctcatcggttggcctggaatcgatgaccttactttcactgtatccgcaatagggacatttcatggaaaaccctccaaagttctaacacaccaaatctgtctcttaaagtagtgttattatacaacagttttcgggggaaaatcaagcgaaaccgtatacttttttctattttggccttaaaatcggaaagaaacgtcaaatctctgcgattttcgcccgcagggcgtgattttgtcccggtttttgcttgatttgaaggctatctttcggtataataaaacggaatatgaaccgaggagaacaactatggcaatacttacggtgaacaacataaaaaagatgttcggcaccgatgtgattattcaggatattacatttgaagtgcagaaaggcgaccgtattggccttgtgggcattaacggttccggaaagacgacgcttttcaaggtactgaacggagaatatacggcggacgaaggcacctttaccccggcgcgcgaaacgtccatcggctacatggagcagcatgtttgccgcgatatggaaaaaccggcgtttgacgaagtgatgacggtgttcgcgccgctgctcaaaatggaagcagagatagaagtgctcacgacgaaaatttcggaaatgccggaaaaccttaacgagcttatcgaaaagcaggcggagctaaacgatcgtttcatcgcagacggcggcctcacctgccgcaaccgtgcaaaaagcacactcatcggcctcggctttgcgccggagcagatttatgctcctatcggtgttttgagcggcggacagaaagcgaaaattcaactcgcaaaaatgctgctcggcgaatcgaatttgctgttgctggacgagccgacgaaccaccttgatattccgtctgttgaatggctggaggattttctgaagaattacaacgggtcgtacatcgttatttcgcacgaccgttatttccttgatgctgtgacgaaccgcacatttgagattgaaaacacgcatttgacagaatataagggcaattatacgaaatatttgcagctgaaagaagaaaaccgccttgcgatgcagcgcgtctacgataacacccagcgtgagatcaagcgcattgagggcatcattgaacagcagaagcggttcaatcaggagcgcaactatgtgacgattgcgagcaagcagaagtccattgaccgtttgcaggcgacgcttgaaaagccggaggatgatccggataccatcaaatttcagtttaaggcgagccagcgcggcggcaatgatgttctggaagcggaagagcttgccctctcattcggcgaccacaggctctttaaaaatgtgaatctcgatatcaaacgcggcgaaaaggtgttcctcatcggcccgaacggctgcggaaaaacgtctttgctgaaagtgctgttgcacatttataagcaaaccttcggcgatttccgctttggcgcgaatatcgacatcggctactacgatcaggcgcaaggcaatttagatgagagtaagacggtcatcgatgagatctgggatctgcacccctacatgacgcagacgcaggtgcgtagcgcattggcggtgttcctttttaaaggcgaagacgtgtataagcccgtgaaagggctttccggcggcgagcgtgcgcgcgtgctgcttttaaagctgatgctttccaaagcgaaccttttgatcctcgacgaaccgacgaaccacctcgatatcggctcctgcgaggcgcttgaaaacgcacttctgggctacgatggcacgctgttcgtcgtttcgcatgaccgttatcttatcaacaagcttgcggataaaatctactatctcaccccttccggcacaacgctgtacctcggcaactacgacgcatatcttgaggcccgtcaaaagcaggaagccgcaaaagccgctgccgaagcggaaaatgaaaacgctgtgccgaaagccaatacagtctataaacaaaagaaagagcgtgcctctgaaattcggaagcgccgtgccgcactttcgaaatgcgagcgcgagatcgaagcggcggaagcggaaattgacacgctgaacgggcagctctccaaccccgagacggcgagcgattacgaaaaaatgatggaaatcacgaataagatcactgagcaaaaggcgcttgcggacagtctgatgaacgactggacggagctgacgctttggctggaagaaaacgacgtgtgacgaaaggaaattaaaatatatgatgaaagcaaaggtcatcaccctcggctgcaaggtgaaccagtatgaatcggaagcgatgctctcttcccttttgcagcacggctttgccgcagcggaagacaaggaaacagcggacgtcgtaatcctcaactcctgcacggtcacggccgaaagtgaccgcaaggtgcggcagatttttcgccgcgcgaaaaaagataacccggatgccgttatggtgctgacgggctgcatggcacaggcgttcccggaggacgcaaggcgactggaggaagccgatattatcctcggcacctcgaaccgcaagcgtctggtgccggatctgctggcgtttctttctgcacgccagcgcatcatcgacattgcgccgcacacgaacgacgaaaaatttgagaatctcaatgtggagaactttacaggccgcacgcgtgcatttgtgaagattgaagacgggtgcaaccgcttttgctcatactgcatcatcccctatgcccgcggccgtgtgcgctcgaagccgcttgaagacctcaaggcggagcttgcggggcttggcgcgaacggctacaaagaagtggtgctgacgggcatcaacctttcggcatacggacaggagttcggtctgcatctgtgtgacgccattgaagcggcctgcgctacgccgggtattgagcgtgtgcgcctcggctccttggagccggagcagctttcggaagacgtgatccggcgcatggcaaagcagaaaaagctgtgcccgcagttccacctctccttgcaaagcggctgcgatgcgactttaaagcgcatgaaccgccactacaccgcagacgaataccgcaccatcgtgcgcaacctgcgcgcagcgtttgaaaatgctgccatcacgacggacatcatggtcggcttcgcgggcgaaacggatgaagaatttgcggaatctttggcgtttgcagaagagatcgcatttgcgaaagtacacgtgtttgcctattcccgccgccccggcactcgtgcctatgacatgggcgatcagctgacgaatgccgtaaaggaagcgcgcagccacgagatgatccgcgtgacgaccgcaacgcagcaggcgttttttaaagcgcaaatcggtcgcacggaggaagtgcttttcgagcgtgagattcaaaaaggcgtttgggagggatactccatgaactatacacctgttgcggtggcaagcggtacgtcccttgcgggcgagattcgctctgtgcgcattgagagctgcaccgatacgcactgcatgggtgccgtgttgtaaaattcacctcgaaagaaggcaattccctctctaccggaattcatcgaggaatacatgtaaacaaaaacgaccgaaagcgcggtgcaaaggctttcggtcgtttttgcgtatatttaagtttagaaaatcaaatttacaagcatgccggtcacgacggagcaggcgtacagcgtaccgacgatggcgaggttctcttttacgcggtggtttgtgcggaacagcacgacgaggcccacgcctgcaccggcgcataagcccgccacgcaggagccgaattgcaggctgcccagcgtgaacagctccgttaagatcacggatgccgcacagttcggaatgagtccaatgagtgccgtcaggaacggctgaaagacgctgccgtttaaaagtaagccggaaatgcggtcttccccgataaaataaatggcatagccgagcacgaggtttacgacgaggataaagagaaaaatgctgatcgtgtggtgcaaggcggagtgcaacaggctgtggtggtcgcagtcgcagtccgcgcacagctcctcaaacggtttctcttttttagggtggaaaaagcgctgtaaaatgaggtcggccagaaagccgaacacgatgccggaggcgactttgatgagcagcatcggcaaaatgtaccgcatctgctccgggtgtgagaacagaatcggcagggcttcatcgcttgtggaaaggaacacggcgagcagtgtgccgactgtgatgatgcgtccggcgtagaaatttgctgccgccacggagaagccgcactgcggcacaacgccgaggagcgcgccgccgatggggccgaatttgccgagcttttgcagaccgcgttccattttgctgcttgcacggtgctctaaatactcaatgagaaagtacgcggcaaacagaaacggcagcgtttttaacgaatcgatgagtgcgtcgagaaagacatccagcataaataaatcctttcaaggtagaggtagcccgtcgaaacgacgggattgcgatgcccgaaaacacaaaaagtggtatacaggcttcgagccagtataccacaattttgccggattgacaagtaaaaatcagagccgatttttaccagatttctgcgttttttgcgcaatgttggcgcacttttgctgcccgtacctctacaaagcagccgcacagcgcacacatgccgttgactaagtggtcgcatgatgtgcattttttcaaacggtctttgtaaagtgcatccggggctttctgctccgggggaatgttttcgatatattcgtagatcgagtgaaaataatctgtgtcgctgaggtctttcagcaaacaccgcctgcagggaatgcgttccatcaggagaccgtgatttccatgacggcacacgccggaatattgaagtgcaggttgttgttttcaagcgtcagcgcgtcgaaatccgtaatcttgacgtcttcgggatggtcgaagtcgttgtatgcgccgatagagtttgtcaaaatgcgtgcagatgccgtattgtacttcttgccggtcagcgcacagtcgatcgggtacgcggtgtcggcggaaatgttcgcgagcgtgatatgcacgacgccgttttcgtcttccgaggcggaaaccgtgaggttcggtacgccgtcgtagaccccctccgtttcgaggtggctattcaaaagcgttgcatcgtgatggtgcttataaagatcgaatacatggtatgtcggcgtaagcaccattttctctccctcggtgaggatgacggactgcaaaacgtttacaagctgtgcgatgtttgccatgacgacgcggtcactgtgtgcattgaaaatgttcagcgttacagcggcgacaatggcgtcgcgcatggtattctgctgatacaggaagcccggattcgtgcccggttccacatcgtaccatgtaccccactcgtctacgaccaggccgactttgtgctcgggatcgtaatggctcataatctccgtgtggcgcgtgataagctcatccatgtacagtgccttgcgaatagtctcgtaatacgtgttggtatcaaagcctgttgcagctgtttttttctcaaatgtgcccggcacggtgtaatagtgcaggctgaggccgttcatgtagttgcctgcaatgcgcatgacctcttctgtccagttgtaatcgtcggcgatgcccgggccgcaggcaatgcggaacacgtggttgtcgccgtaatcgcggacgtaggtctggaagcggcggtagaggtcggcataataggacgggcgcatattgccgccgcagccccagttttcgttgccgacaccgaagtatttcactttccacggctcggcatgaccgtttttggcgcgcaggtccgccatgggcgaaatgccatcaaacgtcatgtactccatccactcgctcatttcctgcacggtgccggagcctacgttgccgttgatgtacggctcgcagccgacctgacggcagaattctaagaattcgtgcgtgccgaaggtgttatcctccacaacaccgccccagtgcgtgttgaccatctttttgcgtgtctccttggggccgatgccgtctttccagtggtattcatctgcaaaacagccgcccggccagcgcagcaccggcagcttaatagctttcagcgcttccacaatatcggttcgcatgccgtttacgtttggaatgtcgctgttttcgccaacataaatgccgttataaatgcagcgtccgaggtgctcggaaaaattgccgtagatattgcggttgatcttgcttttcttttcgtcagtatgaatggaaagttttgccattttaaaaattcctccacttaaaatcggcgataagcatcgccgtgtgtatgttcaatatagcatacaagagtacgaatgtcaagagttgtacgtacaaatatttatcggcgcgcgtcgaccgtccaatgctctgtgatgacatggttttccgcgacgagtactttaattcccaaaccagccgagcacgacgtttcgttttgcgacttcggattgaagcgcgtgcagacaattcaggtcattctcaagcgcgtagaaatgcgttttggggaatttctttacgagcgagagaaacgctttaatgttcggtccgacaagcggatagtgaactgcaccccatctgttagtatagtatatcatacttgtctaacaaatggggtgcagttcattcttagcgcggtgctgttttgttctatcagagaaaaataggtctgcacacaaagaagctactcatttttctatacgaatagggcttaaacctacacatctgccggttcgggcacatcgtcgttgatgatggacttcttcttccaacggcccatgcggaacgcgatggaggtaagcacggcacccatgacccagcttatgagcagggagatgaacagcgcatctgcagagtgcatcagtgctgcgaggccgtatgcgatcggcacacggataacgatggtcgtgatgagggagatccacattggggtcatcgtatcgcccgcgccgcgcataacgccggaaaggatctgcgtgacggccattgcaatgtaaccgatggagagaatgcgcatcatatgcatgccggtatcaatgacgtccggcgtactcgtaaacatttccatgagataacggccgaagaacaggatcagcgcaacaagtaccacggaaacggaaaggccgagctttaagccgtcctttgtgcccttttccacgcgatccaaacgacctgcgccgatgttctggccggtgaaggtcgtcgttgccgtaccgaaggtgaagttcggcatcatggcaaagccgtccacgcgcataacaacggtggaaaccgcgatgatcgtggtaccgaagctgtttgtaagggactgcacgaccagcatggcgagcgagaacaccgcctgtgtgagaccgctgggcagacccaaacggatgagctggaacaaaagcgcttttgtcggccacagggtgcgccacgtgatgtgcaatacgtcacgcattaagagcagacgcacaagacacaggatgccggagactgcctgcgagatgatggttgcccacgcagcgcccgcaacgcccattttaaagcccgcgacaaaccagatatccagaccaatgttcatgccgcatgccacgagcaggaaaatgagcggcatgacggaatcgccgaggccgcgcagaatgccggaaataatgttgtaatatgcgctgccgagaataccgaggaaattgatgatgagataatcacacgacatagtgtaaatatcctgcggtgtttgcagtgcagacatgatcgggtgtgtaatgagcgggcccacgaccatgacgaagatggaaaccgcaaaggttgccgtgatcgccgtacctgcagaatgcgaaagtcgctttttgtcttttgcaccgaaacactgcgatgccatgatgctggcaccgaccgatacgcccatgaacagtacaagcagcaggttgatgatcgggccgctggcaccgatggcggccaacgcgctgtcacccacataattgccgaccacaatggagtccaccgtgctgtacagctgctgcgccaagttgccgatgagaagcggtgtggaaaaccgaatgagatttgtcgccgggttgcccaccgtcatatcctgcgctccgaaaaatgcagagagctttcctgccataataaagaatatcctcctcgccctgagatatactcgaaatttggtgattttgcaagcatatagccttacaaaatcacttgtgttttattgcttccgaatattctccaaaagatttaacgcttaacagtatatcaaaaaaggcgaaagaggtcaattaaatacaaagaagataattaaattttggtattttgccgaatttaatggttgatttatagcgaaattagcaaacaatttcgtcagagattcataacgcggaacggtgtgtgaaaatgtgcttctcccctattttgcggcgaatgtattggcttttttgcagaacggtcattgccgttctgcgccagatggcgaaaagaacgcggcgggcatcacaatccagcgcagagccgagcacggtaaacagcaaaaggctgaatatgcaaaatacggcggctgataggagcagtgcgggatatgagttgagtggaagcggcaaagcttttgcgaaaaaccacaacagaacgaacaataccccgttgcacaggaattttcggtaagtatgctgtgcgggtgcatgcagcagcttgtgggacgcgtagaaaatcatatcgttcgtgcgatacaaaagcgctacgattgtcccgatgagcacgccgtacatgccaagcggcaccacaagcaaaagcgatatgagaagattgatgacggattcgatgacggaacggttctgcgttttttgaaaatgcccggcgtattcgatgacgcgctgcgcggctgcacgtccgtttgaaagcaggtacgtgcagacaaaaagatgcggcaaaacgggatcgagatacgaaatatccgtcacaccggcggtgtagagcttcaaaaacggcagaatgaacacatccgccgtgagatacagcgcaaatgtgagcgccatattgtatgtttcaaatgcgcggtaaagccgcaaaaaatgcgcgcggtcggtgtgataggtttgccccaggacgaacgacacgctgccgtttatggcggagaccgccgtgccgaccatgccgaaaagcatcacgtacatggagtagacgctcgttgtttttagtccgcagacgacagagagcagtaaaacatcggtgttttgaaagatgagcccggagatctggtgtacgagcacggcacggtgctgcgcggtggcagttgtatcgggcggcacggcgcggttaagccagctatactgttttttggcgtagagtgtgagcagtgcggtttgcagtaagccgcacaaaaagcagagcagctgtacggcgatgagcgaaagtccgcaaattagcagtatgattttgccgatgctgatggaaacagttaaaagcaggttggcgttgatgagcacgtatcctctgccctctgcctgcaaaagcacgcggtattttgcctgaaacagaaagcgcacggcttgtcccatgccgccgagcaaaaccgtgagcaatacggtaaaaaacggcagttcggttttgatgaaaaacggaaacagcacggaaagcccgcaaacgagtgcggcgtaagcgatgccgactttggcatattcccggcgaatcgcattgaagataccactgacggcggctctgtcctgttcggcggcgggtttataaagtgcctgcagcgctgccgtgccgataccgctttcaagcaggtcaagatacacgagcgcctgctgtgtagcggagagcaggccgttggcttcggaaccgagctgcacgagcacgagccgcggaatgataacgccgagtgcgacggaaacaaactggctgaaaagcccggaaaaggcattgaaaaagctccttttggcacgcatggctactttacaaacacgtcgcatagcgtgcggatgatgcgctgatcccgccagcgcagatagcggcagcccgcgtgccagatggtgcgcaaagcgggtaagatgacactgccgtcctccggcaggtccttgagcagctgcggcgaaacggcggcgtttgcctcgagtaatagtgcgagcagctccgggtcttccgttttcaaaaagcgctgggcgtaaaaatccgcctcacgcatcaggcggtcgcagcacagcgtgtgaatttccggcaagtcttttttctttgagagcttcagctcagcgatgagcccgcgcagataatctttggtgcaggcgagcgtgatacgtttattggaatgcgtgccgttgtagcggtaaaccacgtcgggcacggcgtagtattctttggcttttaaaagcgtgcagagaagaaaaatgggatcttcatagacacgcagcggcggaaattgcagcttgttttcaagcaaaaaattgcgattataaataaagcgggcgaaaaaacggtcgagcggctcatcgcaggcgttatgaaagccctcctccgtgaaaacaaacatggggtgcacatcgttccccttggctttttcaatagagccgccgcagaccatggcaccgcttttttcggcggcagctaaaagcgtttcgagcgcatacgggcccggatagagatcatcggcatcgagaaatgcaatgtactccccttttgcctccgctatgcccttattgcgcgccatgcctgcgccggcgtttttctgcgtaaggcaccgcacgcggccgtctctgcgctgggcgctcgttagaacgtctgcggaatggtctgtggagccgtcgttgatgcagagaatttctatatctgtgagcgtctgcatgaaaacgctgctaagtgccgtttcgagggtgtcttccgcgttataaacgggcacgatcaccgaaattttgcacatagttcttccctccttcataaaacttaaagcacagcttgtgcagcacagtgcggtttcgtcgatagagctttttaatatcgcgcgtgacggcaccgtactttttcaaaatggcatattgttcctgcaaaagcactttgttccgaaaatcgattgccgtgtaaaagcgctgcaaggcgtatcgcttttcgatctcgtctaagcacttttggtactcggcttccggcattttgatctgcttagcggtttgaagcaagatcgtctcgtgctctgcgatgcggcgcagcttgtcgatttcggttacatctcccgcagacatgccgttttgatattttacatagccgtaaagcggttcgtctaaaaaagcgtgcggaaatttgtaacacaccggcagcatgagctgataattctgcccgcgccgcgcggggtagatcatgcggttcggcacggcttcatcaaaacagcgcatgcggatcatgtgacagccggcgcacaccatgccttcgccgcgcagaagataccaaaactgcatgagttcaaaacggtgcgaaaaccgcgcagcctcgcggtagagcggcattttgaggtcgctctcgtcaaaaacgaaggcgtcactgctcaccgcgccgcacgccgggtgctgcagcagatacgtagcgcgtttttcaacagagcccggtaataaaaaatcatccggatctgcccagcagagaaaatcaccgtgcgcgtggagtaaccccgtttgtatcgcaccgccaagccctatgttttcctgcgtcaacacagtatactgcacgccgctttcttttaaaatcgtctcgaagtttttcagcagctttgccgtatcgtctgtcgaaccgtcatcaatgcagatgagctccaacgggtggtaagattcgcttattacggagcgcatgaagcggtcaagtgttttttcacagttataacacggcagaagcagcgttacgagcggtttttccatcttttccctcctgcaaagtgcggcgaaacgcttttaaagcgtcttcataggcggccgttttggcacgcagcgtttcggtgatctccggcgcgtggctgcgtaggcgtatccacctgcgcgtgacggcagtttcatccgcaatgttttcaatgggcagcacatagggcgtatcgacaccgaaaatgtcttctgcaaggcccttggcttttacagaatacccgagtgcgagcgtgggtacgccggaagaatacgccgcgatgacggcatgtgtgcgcgcgccgatgaacgacgagcacagcgcaataatcgatttaagctgcgacgcactttggtctttgatgaggcatacgcggccgctgccttgaaaggccgcgtataattctttaagcggatcgcggtcatcattgccgttttgcacggcgtgcgggatgagcgccacggcactgtctgttgtgcgcaggattgtgtcaatcagcgcgatgaggttacccaaaataagctttgcgtttcgtgcacggcgcagtaaaagcgggcttacattgataccgacggtgttgtgcggctgaaacacttccggaatctccgcaccgcgcggctccagcaagaaagcggaatccgggcaaaaggagacgtttcgcagcccggcgctttgcagcgcgtgcagcgtttgtgtctcgcgcgctgtgatgcggtcaaatgcggtgaggtcacgtagcagagccttactgcgaagaagcttcggttcaatcgaacagccgagcagtatgctgccgcctgcatagtgccgtgcgaggttgtgcagccgaatgcgcttttgcatatcttcgtagcagtacacatcgccgccgatagagacgagaatatcgtcgcgcgtgagcgtttgcagcgcggcacggtacggcaagacatcgagcggtgtgtaatcgtttaaaagctttaagcgcagataggcgctccaaaatgcgggcgagcttttgcggatcacatcgcttcgcgcggggcgcacatcctgcacaacgagcgggcgcgctacgccgtatctggcatcttcctccggcgcttcggaaagcagcaccgtgcggccggggcctaaaagcttagaaacggtgcgcacaagcgcttcgcacccgtggtttgcgctgccgatgtggtcatgcagaatgtaacgcacgcgtattctcccctttcaaaatcgattttgcgtgttttgcggcgcggtatgcggcaaggtgcagctgcaatgcgggcagattttgctgctttaagcagtgcacgatgcaccgaaaaacgccgtgaagctccgcttcggaaagcagtgcgcaaagcgcttcatcttccataatctctttggctttcgtgatgggatcaagcccgatatccggcgcgtaaaaaacggagaatgccgtgtatgcactgagtcttttgcgaaaaaacggcttaaattccgtgtgcttttgctctgtgatgacccagtgcgcaatctctttttgcaaaaggagctgcttaaagtggtctgcttcccggcgcagcgggtgcgcggcgtattgcatggcacagtgtggcgtgaggagtacgcggctgtttgcgcggtaaagctgtactaaaaattgcagatcctcagcaagcgtcatggattcatcaaatacagcgttgacggaaagaattttctcgcgacgcagaagcttgttccaaagatagccaaaatacccggtttcgtactgtgcttgcatgaagcaaacgggaagcgtttcggaatctatgagaccgtattttggtagtgttatgcgggtaatctcaccgtttaaatccatttttaggtagctgcccatgagaatgtctgcgtcgtttgactgcggctcatgcaatgctttttcgaggtagttcgaaaacggcaggtcgtcgctgtctacaaaccacacccactttccggtggcggcttccaaagcgaggttacgtgcgcgggaaacgccgccatggtgttgcgcgagtaccgtgatacgcgcgtctgcagctgcaaagcgttctaaaatgcggcggctttcatcggtggagccatcgtctacggcaagcagctcaaaatcgcgaaatgtttgggtacacagcgcggaaagcgttttttgcagatgcctttcctcattatagacgggcagaatgatgctgacttcaggcatagtgctctctcctttgcagccacaggcacataagcggcgtgcagcggtattgcatgcacaaaagctgtacggcaagtttaaacggaatatgtcgcgcgggtcggttttgcagcgcacgtttcagcgcttcgtcgtttaaaatgcggtcgatttccgatttttgttcgacctttggcaaatcacaggctccgccgagtgcggcgcaggcgtagtggatgagatgcagatcgagttgacggctgaaattatattccgggcagttttgaaacagtgcgcacagcttttgatgcatacgtttgtagctttcccacgcatctgctttgtgcgttgtggtgatgctgccggggttgcggtggtactcgtaaagcccttggcccttaagataaaagaacgaagcggcgcggtatcctgcacacgcgctgaatagattatcttcggaatatcgcacggtttcgtcgaaccgcaggtcgtattcttttaaaaacgatgtacggtataaacaaacacacacggataaaagcgggccgtattcgagattgtcgcgcatgatgagctgcggaaatacgcagcgtttgattttgcgtttgtcgtaatacccgccgtggagcgatgcagagcgcagcgtgggcggcttgccggattctatgcgtatgaggtcgcagaaaacaaaatcacagtgatactgctcaatcttctgaaaaagcgtttcaaaaaatgtcggcgatacggtgtcatcggcatcgacaaagccgatgaatgctccgcttgccgcaagcagacccgcgtttcgcgcactgctgaggccgccgtttggcttatgcaaaatgcgtatgcggctgtcctcttttttgagccgcgtgcacagtatggagcttgcatcggtagagccgtcatcgataagtaagatttcaatgtcgtgaaaggtctgtgcgatgaggcttttaacgcaccgctcgagatatttttcggcgttgtagatcggcacaatgacgctgatcttcggcataactttcccttccttctgcaaatctcaggattttctccgcttctttatactgtgtgaaatcggtgctgcgacaggcggctttgagtgcttcttgtttttcgttatcttgaatcagcgcggcgagagcatctgtaaaaccgtcaaaatcaagcggcgcgatcatgccgtctgtgccgtcttgcagctggctgtgcgcggtggaaaaatccgtgatgatgacaggcttcccgagcagctgcgcctcccgcacggcgacgcatttgccctcataaacggacggctgcacgtaaatgtcgcacatacgtatataggggtacggattctcctttttgccgagcagcacgacgaaatcttccatatgcacagcttgaatggcttcgcgaatttgggtttcccggtcgccgtagcctaaaatgtaccacttaacggaaaggccgcgctttaaaagcactgtgcagattttcggaatggcttcaaagtttttcgcttcacaaaaccgaccgacggaaagcagcacggtctcgcccgcttcgcgatacatgccggcagccggcagcagcgatttgcgctcgatgagctcgcgcgcaaggcagttttcgaccgtgacggctttttgtgaaaacgcgggatacatgcgccgaaaggcttccgtgcagctttcggaaacactgacaacatagtctacgttcgtatacacacggcggtcgagctttggatttgggtgttgtgtggcgtaatccgtgtggttccacgcgactttgtacttggcgtttaccttgtgcacaagcgtatcggcgacgccgaggtactgcgcggcaagatcatactcgcccgggatattcggcaaaaacggctgcaaaaatgcagagatatactgcaagtgcgtccacgtgccggtgggttttcgcatgaaagtaccgtacaaaaaaaacgcgagctttgcgagtaatcgtgcggctgcaaatcgcagtctgccatgttttacaagcgacaggatcggctctgtataggcgtggtatgcagggattcccggcagcagacgcacatattgcggcaggtcttttatgaattctccctcgcggcggtacagaaaaacggaggcctgcacgcttttgtcttcgagcgcttccaacagtccgataaggctgcgctctgccccgccaatctctaaagacggcaaaataaaaagcagttttttcggttccgttttaaacgccgcctttcactttttctttgatacgcggatggtcggcgagcaggcgatgcagcgggcgcgtgagcttgctgcgcagtacggtacggcggttcatccagcttttggcataccagtgcacggtgtaggtgcagtctgtgatataaagccgccccgtggcatcctcgtaggggttaaaatacgccttgggaaagacggctgcgccttgcacggtttgtcgcttgccgtttggctttaagccgcattttaaaagcgcctgtgtattgagctgcgggcagccgatgacgccgtgcttgccgtcgagcaggggtgcatattgctccagcatgaagtgcacgagcggatggtgtttttctgcgccgaagccgaggccggtcgcaatcatacggtcggtctcaaaggcaaaaaacgcgtgctcgctgcaaagcgggtccaaactgcgcacgagctcgacatctacatcaaagtaaaagccgccctcgttttcgatgatctgcaagcgggcgtaatcggcgagaaacgcgtactttttctctttacagcacatttcggtgtaaccgttttggtgaatgtcaaaattatcttcgttccattccaaaatcgtatagttcgggcagtgcttgcgccaactctctatgcactttttggctttgtccggcagtggtgcgcgaccaaaccagcagtaatggatgattttcgggatcatacagcctccttttgtgctttgcgttcggtgcgtgcggccatcaggcggatcaaaacggaaagtcctgcgccaagcggcgtgcacagcattgtaagcacctttttcggtgagcggagcatcagtgcgggctctttcgcgagaaaacacgcggcatcgtaatggatgctgtcgagtaccgtgcgcgttgcagcagccgggtacgtaaggcaaagctgccgccaatatagaaagccacgcgggttttttgcgtattgcttccatatggtgtgcgaggaaccgtcttctaaatacgtcacgtggcacagcacgcgatttaaaacggcgagtttgtaatcgcggtcgatcagccggtattttgcggcgagcgccacgtatttttcatttggaaactccgggtacggcgggtattttcggatgatgtcggtacgatacacgagctttttgtcgcctttgccgccgcccgcatagtaaccgctgagcgtcgtttcggtgaggcccggcggaaagccggtgccaataagcttgccgtttccgtcgtcatcaagcccgatgagcccggcgcaattcttgctttttatctgtgcccagcgcttttcaatttgctctacggcatcctttgccaaacggtcgtcggaatcaaggcaaaggttcagctcggtctcgatgtgcgcataagcggtgttgtgcgcagcgtgcatgccgccgtttggacggtataggtaacggatggaaaatgctttctccgcctgcatccaggcggagaccaacgcggcggtgcggtcggtggaaccgtcatctacgatgagccataggaagtttttagatgtttgcgcttttaatgagcaatatgcttccggcagcgtgtgtgcgcggttatacgtcggcgtaaatacggtcagcagaaccatgtgcggtttccctccttttttgggcatccttttgcagataatacgcagtgagcatatgtgcgttttcacaaatgtcaaagctttgtagtacaggcggcgcggcgctgagcaccttactttctgccaaaataacctccgcccacttagaaggcggtgcggaaagcggaagctgccgtgcacgcggcgtttgaagacaatccttcggtacaccgttggagacaaggcacggtagccctgcggcctgcgcttccaaaacggagagcggcatgccttcgtacagagacggcatacagaatacatccattgcatgcaaaagtgccggaacatcttcccgcacgcctaaaaacagcacatacggtgtaaggccgagtgcggcggcgcggttttgtacggctgcccgcttttcaccgtcgccaacaaacagcagcttcgattttgtaccgcatgcgcgcagactgtgcaggacatccaagaggaaagcttggtttttctctttgcgaaactgccccacatgcccgatgagaagttcttcttttgtgataccgagtgtgcgccgcatgtcttcgcgcatgtttttatcaaagcggaatttttctgtatcgatggcgaccggcagcaccaaaaacggcgcactgccgaacatccagcgcccggcatcttctccgcaggcaagcagatcggtcgcggtacgtggaatgatgcgcttatacagatcttttattggatacttgaagtcgcgcagctgatttgtggtgtgtgcgtgagcaatgcatacaggcacgccgtgctgcttggcgcaaccgagtacaacgccggaaagacaatcaagatgggcgtgcacaacagtatacgccgggtgggcggagaaaaatttgtgcagtgcatggcggtatgcggggctgaacgggttttgccgtggcacggtgaaaactttgccgccgagagagtaaatctctttatcgtacgcgccttcccgtgcgcggtgcgtcagaaaatcgaactgcacgcgtgtgcggtctatgtgacggtagtaattcatcagcatcgtttccagtccgccgcggtccatgcaggtgacagcctgcaaaacacgaagcataacggatccccccttttataaaaggccgaaggtcttcagcccgtagaaatagaaaaacagataaaaaatgagcatcatcacggttaaaatgcgcacggagcgttttgaaaacatgtggtgcagctcccatggcagcaaaatgtagttataaagtgaaaagtatatgggcagccgcccgacaaaaatgccgcttgtgaacgctgagaggatgtaaatgccggtcgatacaatggacatgttgacgcaaaggtcgatgagtgggtcattttctgcacggataaaccgtaaaccgatcaaagaaagcaacgtcggcacagcgtagaccagtacgcgcagcaggtttgtaccgttgtcctcaaagcctttccaatcgctgacgacatttttgtactgcgtttcctgcaaaagcagctccaaaatgtttgtgaagcggtcgatgaaaagcacgaccaaaacagtgagcagaagaaacaaaagcgtttttcggttccatgcttttccgcgtgtgagaaaaacaaacggtagtgcgaacagtgccgaggcatgcagtgtggcggcaagtaaaatgatgagcgtggcttgtccgtatctcttgcgcagcaaaagcggacagcaggcgaacacgagcgccgccgccaaaaattgccgcatgccgttcatcatccaggagatgtaatccgtggaagcgataaacaaaaacagactgatgcagtagctttccgaataaagccgatagtttttaacgagcggccagagctgaagcgcggcgagaatgcaaaaccaaacgcgcacctgcccgccgcacaaaagcttgatgagtgcggaaagcaggaaaaagccgtgatctttctgtaaagactggatgtaatcgggcagtgcgctgaatgtgctcggcatttcggaaaacgcgtgcatgtagttataggtatcgccgatatcaccgcgcagcgtacagaagatgagcagcggcagtacgccgagtgttgcccagagcttcgtgaaccgcactgtctgcacgccgcagacagtttcgctttgctgtacttccaacacggcggagagcgccgtgtaaatcagaagccaaaggagcatccgaatataaccggacatgtgttctcctctatgccgtgacgcgccggggctgcggtgccgctttttcggcggtgacgatgcgcagtgtttctgcaacaacgctcgctttatcgaattcacgctccattttgcggcggccgttttgcccaagggctgctttttgctctgcggaaagcgccaaaaacgcgcgcatggcaacatataggctgttcgcgtcttttgcgcggcacaaaaggccggttttgctgtgctctacggcttccctgcacccgggaatatcggatgcgatgatgggcctgccgacggcggcagcttccagcagcacgttgctcatgccctcgtggtagcttggcagcactacgcagtcgcagttttggtaaaacggcagcggttctttttgaaagccgtaaaattctgtcatgccgtcggcaacaaggcggtctacctcctgcctgtactgctcctcaaaaaagccgagcagctgcaaatgcacgtgaaagccctctgtccacagcctgcgcacggcgcaaaacagctcctctatccccttttcgcgcatcaaacggccgacgaacaggaatcgcggcggatcgtgagcggtgtacggcgtgtagatatagcggttcaggtctacacccgcaccatgcagaacgacctctttttcgggtggcaggatgtgtctgcggcaaaattctaccgcattggactgattttcaaagaatacgttctgtacacgcagaaacgaaagcttgtaaaggaatgtggcagcgcagctgagccacgggcgctgaaaagcgctgccgagtccctgtacggtggcgtaaaacggaatgcggtagcacgtgcagagaaaacccatgtatacattcggcttaatggcgtatgtaagcacaagatccggcttttccagacaaagaacacgtttgtacgcttgtaaaagacgcaattcagaaagcacctgcacgcgccgccgctgcattttcgtttccgtacagcgtatgcccatgctttcaaacacttcttcaccggtttgaaacggcgctgcaacgaccacctcataccgggattgcagatcttcaatcagctctcgtcgaaagcggtacagcatataaaaatgatttgccgcaatcaatacttttttgcgcctgtattcggaaaagttttcatttatcgcgaaattttcacgcttttttgacacaaatctgccgaacaaggccaaatgcagcagatgtgccgaaaagcgcggtattttgcttttacacattctaaacctccgtatagcaagatgaaatgtatctgtaccggtgctgataccgttattgtacaatgcgagaaaaaagaaagcggtcgaattctttgtgaaagcagacatttatttttgttttttctttgtgtccgtcaagcgaagacgttttactattactgcgggggctttgaatataaaaaagctccctttacgggaaaccgtgcggatgcacacagttcctgtaaagggagcaaaattccttttatgcggttttaaagcggaagcctgcggaaaagcttactttgcgagcttttctctgatgacctctgcaatgtgctctgcagaaaggccgaattccttcagcagatccacagccgggccggagtggccgtacacatcgttgacaccgatgcgcgtgacaggcgtcgggcaatgctcggaaagtgcggtggagaccgcttcgccgagaccgccgatgatgttgtgctcttcaaccgtgatgacacggccggtcttctttgcggaagcaataacaagctcttcatcgagcggcttgatggtatggatattgatgacttcaacgctgatgccttcttctttcagtgcatcggcagccttaacggcttcctgtaccatgagaccggtcgcaacaacggtgatgtccgtgccctcgcgcagcgtgatgcccttgccaagctcgaacttataatcatcgttgttgttgatgctttccacagccagacggccgaggcggatatagcacgggcccttgtgctcaacagcagcgcgaaccgcggcctgcatttcgtaatgatcgcaggggttcagaatgaccatgcccgggatggtgcgcatgagcgcgatgtcctcgcagcactgatgtgtagcgccgtcttcaccgacagagatgccggcgtgggagccgacgatcttgacattcagcttcggataaccgacggagttgcggacctgctcaaacgctctgcctgcggaaaacatggcaaaggacgccgcaaacggaattttaccgcaggtggccagaccggcagcaacgccgaccatgttgcactctgcgatgccgcagtcaaagaaacgctccgggtatgcttttttgaagatgcccgtcttggtggcagcagcaaggtctgcatccagaacgacgatctccgggtattcagcggcgagcgcggtaacggtctcgccaaagctttctcttgttgcctttttaaccatttcagccatatcagcagccctccagttcatgcagtgcagcggtgagctcctgcatagcggtctcatactgttccttgttcggcgcggtaccgtgccagccgacctgattttccatgtaggaaacgcccttaccctttacggtcttggcaatgatgacgctcggcttgcccttaacggtctttgcatgtgcaaaagctgcttcgatggcgtcgaaatcgtgtccgtcgatggtctgtacgtcaaagccgaaagcctcgaacttcttgtcgatcggttccgggccggcaacttcgctgaccgggccgtcgatctgcaggccgttgaagtcgacaatcaggcagaggttatcgagattgttatgggatgcaaacatagcagcttcccaaacctgaccctcttcaatctcgccatcgccgagcagagagtaaacacggtagtctttgttatcaatcttgccggcaagcgccatgcctgccgcagcggaaacgccctggccgagagagccagagctcatatcgatgccggggatgcccttcatatccgggtgaccctgcagcatagcgccgatgtggcggagctttttcagctcatccacagagaaatagccgcgctgtgccagtgcagcgtaaagacccggtgcgcagtgacccttagaaaggacaaaacggtctctgtccggatccttcgggttctgcgggtcaatgtgcagttctttgaaatagagataggtgaaaatatccgcagcggaaagggaaccgcccggatggccggatttggcgttgtaaacgccttcgatgattccaagtctgactttggcagccgtgattttaagctgctgcttatcgcatgaattcatggaagcctcctgtgtttttagcgcccggcacgggcaatcccgtaaaaaccgcagcgcgagtcattatggtcttattatagcgcatttcggtggcctttgcaacgctccacgccaaaatttcgcccgttttttcgtgctttttgcatattcaccgtatgtggagagacaataggcacagcggcgcttataaaagccttaatcggtacgtacagcttttggctgcgccggaaaaacggaaagaacaaaacaaaactacaaacggaaaggaacatcgttttatgtctcagaggatcggcaacctgcctgccaatatcaacattatgaaccctgtaccgaacaaggatgcgaagaccatcatgaagctgatccgcacgaacggcaagatctccggctaccagctttcggatggcacggtgctttccaaggcggacggcgtggcgcttgcaaagcagggcggcatccgcggcgtggcgattgcgagccgcaacggcagtgaatatctgcgcagtataccggacggcaaggagagcaacaatttaggtgacctcccaagcaccggcctgcgcggtctttcctaaagaaaagggagcctgtacgttttgaaacgcaggctcccctatttttgtttattttgtgttttcgagcgcttcacggtaaatttgtacggcgtgttcggcaacggcgacgctgtcaaacggctttgccgcagcacgaattttggcttcatccagtgtgtccgaccgtgcagccatgcgcaaaattgcatcttccatatctttcgggtcatgcacattgcagaactcggcgcagtcatcattcaaaaagctctccgggcctttgcaccgtgtagaaatcaccggcacgccggccgcgagtgcttccacggcaggaatgccgaacgtctcaatatccgaagccatcaaaagggcgtcggtctggcttaaaatctccgcaatctcactttcggtcttgcgcccggcaaaggatacaatgtcgttcagcccgagctcagatgcggtctttttataaaacgcttcctcctgcccgtcgccgacaatcgtatacaaaaacgatttttccgggtgttgctcccgcaagagcttcaaggcctgcaaagcgttttccacgcatttgccggggcgcagtgcggaaaccgtcgtcaagcgaaaatgtgccgggtctttcgttttttttgcgccgcaaaatgccttggtgttgacgatgttcggcagaacttcggcaggtatattgtgcttttcttttaaaatgtccgtcatatagccgctgacgcaggtcatcacgctgtgccgtgcagcatagagtccgtattttgcggtgctaccctcaaagaagcgctcaaaatatgaggagtgctccgtgatgacgaccggaatatgatatttttcgccgagctttgcagcggcgtatccggcgggcacggtgacatgtgcgtgcagaatgtccggcttgccgtgcttcttcacgtaggctttgtaaagcttttcaacggtgcggcagtaagcgttgagctgtgcgtctgcgctgaatttggagatgtccagcatacggcggcagtatgtcacatagccggtgttcgattcttcgtagagcttctgcatcgtggggtacttcggcagtgaagacagcccctgtcggtctacatagagcatgttggtttttacgccgtattccgcaagtgccgtgcagaacagcttgtggtaaacgccgatcagtttatcctcaccgtttgggtaccatgtgggaatgaccaaaacgtgaagcggagaatttttctgcatgagtcttttggttccgatagcgcgcgatgcgcagtctatcgaaaaatcctttcattcgtagtatggaaaaagctatttaatttctgcgcacgaatgcctttttcggcattttgcagaccgggcacacccagttgtccggcagttcttcaaagctgaagttcgggtcgctgtacacatagccgcacacggagcagacaaagctttcaccgctgctcttatcaaacgtgctttccggcggcacataggtcggcgagccgaccggcgacagaccgtgcatttcactgcggtagaaatcatacgtcatcggcgtgccgatggcgctgtcgctgcccgctatgatctcggcggcgaagaccatctcctgccctacgtccatgccggagatgaccttgcataaaaaccagcagcaggtattctcctttacgacgggcacgccttcaatgagcaccttgtggcggatgtttttcagcttgtctgcatttttaccgctgacaagaccgagtgcgccgatgacgctggcaggtgtatctgtggagagtacagaaatggtaaaaatgccgttttcgcggattgcggtgcagctgtgcgtatcttttgtcagcgcaatgagcactttttcggggtcgctgctggaaatttggatgaccgagtttgccacacaggcgttcgggcggccgttatattttgtgccgatgacgtacatgccgtatgacagatttttaaggactgccgggttcatggcggtgcacttccttccgttatgttaatagagtttatgagctgtgctttcgttttatgttttcccaatacgctttaaacgcctgctcgtttttgttgtctccgtagtgatagtacgaagcgccgagcaaggcatccggaagatactgctggtcgagccaatgatccgggtaatcgtgcggatagcggtaaaactggcctttcttagcgacatctgaaccgtcataatgcacgttttgcagcgtgcgcgggatcacaccgagtttgccggccttcacgtcgcgcatggcggcatctatggcagattcaccgctgttcgatttcggcgccgtcgccgttaaaatgacggcatccgcaagcgggatgcgcgcttccggcaaaccgaccatcgtggcggcgtctacggccgctttcacgatggggatgatctgcggccacgcaaggcccacgtcttcgcaggcgcacaccatcaagcggcggcatgcagaggcgagatcgcccgcttccaaaagccgtgcgagataatgcagcgccgcgtcggggtcggagccgcgcatggatttttgaaacgccgaaagaatatcgtaatgcgcgtcgctgtctcggtcataccgcatggcactgcgctgtgtaagctgctctgcaagttccatggtgatgcgcggctcgtcctcgcttcgtacggcagccgtgcaaagctctgccgcgttcattgctttgcgtacatcgccgccgcaagcagaagcgatatacgaggtcacgccgtcttcgagccggatttcttcgccgcggtcttccgacaaaatgcggaatgcgcggtctacggcgcgggcgacctcctctttttccacgggcttgaactcaaacaccgtggagcggctcaaaatggcgttatatacgtaaaaataggggttttccgttgtggaagcgatcagcgtgatgctgccgttttcgatgaactccaagagcgtttgctgctgctttttgttgaaatactggatctcatcaaggtacagcaaaacgccgtttaccgcttgcagcgtgtttacctgcgccaccacgtcgcgaatatcggcggtggaggccgtggtgccgtttaacttgcacaggtgcatgtggctttgctttgcaatgatggacgccacggtagttttccctacgccggacggcccgtaaaacaccatattcgggatggtgccggattcgatgatgcgccgcagtaccttattagggccgagaatatgctgttgtcctaccacatcatcgagcgttttcggacgaatgcggtctgcaagcggtgcgttcatcgtgttctccttttagtcgttataaagcggatatttgctcaaaagctccgtgacctttacccggatggcgtcggcactgctatcaaagtcggtcgcgcacaggtggatgcactccgcgatgacgtccatatcggcttccttcaggccgcgcgtggtgacggccggtgtgccgaggcgcacgccgcttgtgacgaacgggcttctctgctcgttcggaatcgtgttcttgtttgcggtgatatacacttcgtcgaggcggcgctccagctctttgccggtcagctcgccgtcggaaagatcgagcagcatcagatggttgtccgtgccgccggaaacgagcttcatgccgcgttttgtaaggccttcggcaagcgctttagcgttttttacggtctgctcggcgtaggtcttaaactccggcttcagcgcttcgccgaggcacacggcttttgcggcgataatgtgcatcagcgggccgccctgcgtgcccgggaaaatggctttgtcgatttttttcgcgtactcctcacggcagaggatcatgccgccgcgcgggccgcggagcgttttgtgtgttgttgtggtgacgacatcggcatacggcaccgggttcatgtggcagccgcccgcaacaagacccgcaatgtgcgccatatcgaccatgaggtacgcgccgcatgcatcggcaatctcgcggaatttcttaaaatcgatcgcgcgcgggtatgcacttgcgccggcaacgatgagcttcggtttaagttcgcacgcctgctccatgagcttatcgtaatcgatgcggtgcgtaacggggtcaacgccgtaagccgcaaaattatagtaggcgccggacatgttgacaggagaaccgtgggtcagatggccgccctctgcaaggttcatgccgagcacggtatcgcccggctgaagcagcgcgaaatatacggcaaggttcgcctgtgcgccggagtgcggctgcacattggcatgctctgcgccgaacagacggcaagcacgctcacgggcgatgttttccacaatgtctacatctgcacagccgccgtaatagcggtgacccgggtagccctcagcatatttgtttgtgagtaccgtgcccatcgcagccataacggcaggagacacaatgttttcggaagcaatcagctccagattgcggcgctggcgtttgagttccagctccatcgcttcgccgacctcggggtctgcggtttcaacaaaaccgatcgtgttcagaagatcaccgtacatacttcatctttcccttctaaaaataatatgctctgcggtttatgtgccgcagtacttcacaaattataccctattccatttaaaatggcaatagatgatttgcaagcacataatggatggcgtaaagcaataacatatgtgccggatagctgatgtagaaaaaatatttgagcgaaagcgcgccgcgcttgccgttatagagcagcacggggatcgcggcggcgatggcatacagctgtgtcgtgttgccgtcctgcgtatattgcccgtaggtcagcgccgcaaacgccacggcatcaataccgcggtacttctggaacaaatagaaacaaagtaccgttaaaacaccgtaaacgccatagctgaaatgcaggaaatacggcaggattgtcaagatcactgcgccgatgaacatgaaaatattgcggcttttcgcggaagcatctaaaagtttcatcacaaaaagcgccgttaaaaacgtgaacaggatattttgccgctgaaactcaagccatgtaccctgaaataaaaggtcatacggcacttcggagagcaaagcaaaaatacccatgcgcaatgcgtagcggttaaaattgcgtgtgtgcatgtagccctgcacgagcaaaaacgcgtagatcggcatggaaagccgcccgatatagcgcagccagataaactgcgggaagaaaatcgccccgacatggtcgatgatcatggtgacgagtgcgatgagctttaaggtaaacgcagacattctttttcccctttgcggttatttgtcggtctttcaataaaaataaatttaccacccttttccggtattgtcaaccgaatgaaaaagttgtagaataaacgtaaagcattctgacgggcttgcccgccgctttttcggaggtctgtatgacaaaaaaggaacgtgcgcttcttgctgtggaagcgctgaaaaaagaatatcccggcgcggtatgttcgcttgaatatcaggatccgctgcaattacttattgcaacgcgactctccgcacagtgtacggatgcccgtgtgaacctcgttacaccggcgctttttgctcgcttccctacgctggaagccttctgcgcgggcagcgaggaagaaattgcggagctcatccgctcctgcgggttatataaaacaaaggctcgtgatatttttgctatgtgccatgtgctgcgcgattcgtataacggcgtgattccggacacggtggatgagctgacaaagctgcccggtgtgggacgcaaaaccgcaaatctcgttgtgggcgacatttacaaaaaacctgccgttgtgacggatacgcactgcatccgtatcacgggacgactcggtctgaccgaaagcaacgtaccgctcaaagttgaaaaagacctgcgcgcggtcttgccgccggaggaaagcaacgacttttgtcaccgtaccgttttacacggcagagcggtctgtacagcgcgtaatccgaaatgtgctttgtgctgcatgaattcgttctgcaaaaatcccgtgaacccgatagagtaaataaagctaaaaaacgcagcgcttttccgttgtgttgttcttgataaaagaaaggaagctactttttatgttcaagttttgtaagacccagctttgggagtgctcccgcacgctttccgatgttgcaatgggcagaaagcccgcagagacggtcattcgcaatgcgcgtctcgtaaacgtctgcacgcatgaaatcctcgacaacaccgatgttgcaatttcctgcggccgtatcgcacttgtcggcgatgccgcacactgcatcggtgaaagcacaaaggtcatcgatgccgagggtcagcttatcgccccgggtttccttgacggtcatatccacattgagtcttccatgatgacgccgatcgaatatgcaaaggctgttatcccccatggtaccgtcgggatttattatgacccgcacgaagtctgcaatgtgcttggccttaaaggcgttgacctgatggcggaagaggcggaaaagactccgctgaaggctatgctgacgaccccctcctgcgttccggctgttccgggatttgaggattccggcgcggagatcaccgccgcggatattgcctcggaaatgaagcacgattataccgttggtttaggcgaaatgatgaacttcccgggcatcaccgcttccgcggagccgacgcacaacatcaccggcgaaacgttgaaagccggcaaaatcatcacaggtcactattccatcccggagacgggtcgcggcctcaatgcatacattgcaagcggcgtgcgctgctgtcatgaatccacccgtgcggaggacgcactcgcaaaaatgcgtcttggcatgtatgccatgctgcgcgagggctccgcttggcacgatctgcaggaggtctccaaggcaatcacggagcacaaagtggacagccgatttgcgaccatgatttctgatgatacccacccgcatacgctggttgcaaacggtcatctcgatcacatcgtgcgtcgtgccgtctccttcggtatcgattttgtcaccgctatccagatggtcacgctcaactgcgcacaatgcttccagatggatcacgagctcggctccatcaccccgggcaagtgcgcggacatcgtatttattgataacgaaaaagacatccgtgtcacccgcgtgctcatcgacggcgacgttgttgcagaaaacggcaagctgacgattgacctgccgaagtctgagcttcccgcatgggcgctcgacacgatgcacgtcggcgagacgatcaccccggaaacctttaaggtgcataccgataaggttggcacggcaaccgtccgtgcgatcgagattatcccggtacatgtcggcgactatgagcgtcacgttgaactcaaggttgaaaacggcgaattaaagagcgatgtggagcaggatgttttgaagacattcgtcttcgagcgccacaataagaccggcaagcacggcgttggctttgtcaagggattccacgtcaagtgcggcgcaatggcttccaccgttgcacacgatgcacacaacctgctcgttgtcggcacgaatgacgaagatatggcacttgctgcaaacacactcattcagtgcggcggcggtgagtgtattgtgcagaacggcaaggtgctcggctgtgttccgctgccgtttgcgggtctcatgaacacaaagtccgctgaagaaatggacgagctcgtcgagaacctcggcaaagcttgggaaacgatcggctgcgacattcagtctccgtttatgacgatggctttaatccccctcgcctgcctgccggagctgcgcctgaccgaccgcggtcttgtagactgcaccaccttctcttttgcagaccttgaggttgaataagaccgtttgaaagtagattactttattttagaatgggaggaattaccaatgatctatgattttgaaacgctggtttccagaaaaaacaccggctccggcaaatgggacgagatgacaaaagagcatccgaatctgccggaaaacgttgcaccgctttccgttgcggatatggagctgaaaaacccgccggagatcgtagagggtctgaaaaagtacatcgatacgcatatcctcggctataccggccccacagaggaatacttcgatgcggtatgcggctggatgaagcgtcgcaacgactggaatattaagaaagaagaaattgtttctacacacggcgtcgtaacggttctggctgtttcggttctggcctataccgatcccggcgacggcgttatcaccatgccgccggtttattatccgtttagaatgaccattgagcacaataacagaaaaaacgtggagtgcccgctcatcaacacgaacgagacatacacgattgactttgacctctttgagaagttgtgcgcagaagaaaaaaataagatgtttatcttctgcaatccgcacaacccggttggccgcgtttggacggaagacgaaatcgcaaagctcggtgccatctgcgcaaagcacaatgtgattgttgtcagcgacgagatccactccgacctcatcatgccgggtcataagcacgtggcatttgcaaacgcctgcaaggatgcactgccgaagtatcttgtttgcactgcgccgagcaagacgtttaaccttgcgacgctccagacctcgaatattgttattcccgatgaagaactgagaacaaaattccagagtattttacagcaacacttcacgccgtccgccggtgcgctcggccttgaggcctgccgtctcggctacacggagtgcgaaggttggcttgcagaagtcatcgaccttatctacaaaaactacaagaacttctgcaagttcatcgacgtaaactgcccgggtgttacatacagcgatctgcagggcacgtacctcatgtggatcgactgcacgacgttcggtctcgatgatgaagcgctcgataagctcctgcgcaagcatgatcttttctgcgacgccggcacgctgttctcgcagggcggcaccatgcatacacgtgtaaacctcgcaggtcccgaaaagatgctcaacgccgcgatgcagcgctttaaggacgcgtacgacgaagcgaaaaacgcgtaagcttgcgcctgaaattccgtaatgtataacaaaaggcgaactgcacaactccgtgcagctcgcctttttgctatgctgttttactgaatgccgagcgcgtctttcgctaaacggtcggcgaggtcgttgtatttgtcgccggagtgccccttgactttcacaaagcggaaacggatgtactttgcggctgcggcgcagaattcgcggtacgcaatggtgccgggcttttttgctttccattctcccgttgcccattttgctacaccctcgtaatcatggtagattgtcacgaagggcacatcatgctcgatgcagtagcgcagaacagtttcggagcccttgatctcccctgccacgttgcgcatttcggtaaggtcggggtcggtgaacctttcggaaaaatgcagctcttcgccgtttaaaaacagcacagcaccgcaggaaaactcctttgtgccgatgtggtagctgccgtctacgtaagccacggcgctgtcttcttcaggcgctgcggtcgtgttttctgccggagtggctttcgtcagatcgttttcaccgcgcatataggcttcggcttctgcaagcgttggaaagcttttgaacgacgcgcctttaaagccggtcgtctgcgcacggcattcgtcccacgtttcaaaaatgccggttttgcgcccggcgcggacggcgtagtatttttttgccataaaatgaaattccttttcgtttattcaaagatcggggtggaaaaatagcggtcgccgctgtcgggcagaagtgccacgagcgttttttctgcattttcgggcatgcgcagcaggcgcacagctgcggcaagtgccgcgccggacgtgatgccgacgaggatgccctcggtgcgtgccaataattttgccgttttgtacgcttcttcatccgtgacggtcagcacttcgtccacaacggaagcatcgtagttcttcgggatgaagtttgcgccgatgccctgtaagccgtgtgcaccgcttttgccctgtgtgatgagcggtgaagtcgccggttccaaaccgacggtgtgtacctgtggcagatgcttttttaaatagcgcgccgtgccggtgatggtgccgccggtgccgatgcccgcaacgaaaatgtcgagtttgccgtctgtttgctgtacaagctccggaccggtcgtttcataatgtgcggcagggtttgagggattctcaaactgtgcggggatgaagctgccgggtgtacttttcgcgatctcatccgccttttcaatcgcaccgcgcatgccgtctttgcccggtgtgagtacgatttccgcgccgtatacggaaagcagcttgcggcgctcggcgctcatggtttccggcatggtgagcaccacgcggtagccgcgcgccgctgcaatagatgcgaggccgatgcccgtgttgccggaggttggctctacaataaccgcgccgggcttcaatttgccggctttttcggcgtcttcaatcattttcagtgccgcacggtcttttacgctgccggcggggtttaaatattcaagcttcaaaagcggcgcgttggaaatgcccgcagatgccgcaaagcgagacgcacgcagaagcggcgtcttgccgatgagttcggttacagatgaagcgatgtgttcgtttttcataagacagatcctccctttctatattgctaccattgtacccccgattttacgcgcggtcaagagcgcgatttttgcaaatcttttgcgtttgtaagagtttcttaagttgtttattttttgtcttacctgtataatagaaccatcagagagtccgcgctgggtgttttgcgcggaggaaaggactgactttatgactaagaaaaagattttcacaatcgccggtattgccgtcggcgctgtgatcgtgatcggtattgtaatctggctcattttcttccgcggcggcagcgttgcgccgagcgacccaaatgagatggtgtatgtgacgagcgttgcggacatcaccggcacgggttcacttggtatgacggcgaaatactccggcgttgtggaaccggaaaagacgctctccgtgcagaaggacgatacaaagaaaatcgcagagctgtatgtgacggtcggccaggaagtgaaagttggcgataagttgttcagctacgatacggacgacctgcaaatgcagcttgaagaggcgcagttacagctggaaagccttaaaaaccgcatttccacgctgaaccagcagattgattccctgcagaaggaaaagaacaaagcgtcttccgacgaacagctttcctataccctacagattcagtctgcgcagcttgaagtgaaatcgacggaatacgatcagtctacgaaggcgaaagagatcgagaacctcaaaaaatcgcttgaaaatacggatgtcatagcagaaatggccggcgttgtgaagcagatcaatgacggttccaataccaacacaagcggcagcaattctacgaacgcgtatattacgattctcgcgacgggttcttaccgtgtaaaaggcacggcaacggagctgaatgtctattccttgcagaagggcgtgaaaatgaaggtcgtctcccgcgtagacccggagcagacttggacgggcaccgtggagagcgttgaacgcgaagccgcaaacgataataacaacagcggtatttcctacggttccgaaagctcgtttacaaaggcgacaaagtataacttctaccttgtgctcgatgatttcaaaggtctcatgctcggtcagcacgtttacgtggagccggatgaggccaaagacgtgaagaccggaatttggctgccaagctactatattctcaacgaaggcagcaaaaactacgtttgggccgtaaacgataagaatcgcatcgaaaagcgtgaagtgcagctcggcaagtttgacgataccctttccgaatatgagattacgtccggcgtgacggcagacgatcgcttggccgttgtggaagaccgcgtgcacagcggcatgtatgctacggatgatatttcttataagaatcaggggaatgattccggtgacatgaacgatgccaaaacggacgatgcaaacggtgttatgcccgcagaaaacggcagcgatatggacggcaacccgaacggctacagccccatgcccgcagaaagtgccgtaacggagtcagagggcgaaacagacacggcagccggagaagcaagcacggcagatggcgtgaccacctatgaaaatgacggcgcggcgagtcttggaaccgttatcgggggtgctacggcatgatcttagagctgcacaacatttataaaacgtatattcaaggcaaaatggaagtgccggttctaaaagacatctctctttctgtgaatgagggagaatatgtcgccatcatgggtccgtccggctccggcaaaacgacgctgatgaacatcatcggctgccttgatctgccgacttcaggcacgtatgcacttgcgggcgaaagtatcatcggcagcagcgaatcgaagctttcggaaattcgcctcaactccatcggcttcgtgttccagagctttcatcttttgcctcgccagagcgcggcggaaaacgtggcgcttccccttttatacgcaggtgtgccgaaaaaagagcgacgtgcgcgtgccgtgcgtgctttagagcgtgtaggtctcggcgaccgtgtggattttaagccgaaccagctttccggcggtcagtgccagcgcgtcgcgatcgcccgcgccatcgtcaacaatccgaaaattcttttagccgatgaaccgaccggcgcgctcgacagtcagtccggcgcgcagattatggagctgttccagacgctcaacgacgagggtgtgaccgttgtgatgatcacgcatgacattgatgtggcaaaccacgcaaagcgtgtgctgcatattcgcgacggtcagtttgcggaacagcatatccccgaggaaaaggaggcggaagcatgaatctgccggcaaatttcccacttaaaaaagtcattatcacggtggtctccgtagtgatcgtgatcgcgctgatcatcaccggcgtgacggtcgcggtgaacggcaaggcggcaaatgccacggtggatgtggagcaggtttcaaatatctccacgcagtattggggcgaccagtccagcacctacggtaatgctacaagtgactttgtgcaggaactttaccccgataaagaaaaagctatttctaagattttcgtcaaagagggcgatactgtcaagattggcgatacgcttttgcagtatgatacgacaaagctccagctgaaggtagagagcaaggagcttgaagaaaaaaagaagaaatacgaactggagcaggccgaaaaagaacttacgaagctccagaatacggcgccgtatgtggagccggctatcccggagcccgagccggaacccactcccacgccggtgccggaatcgcaggcggaactgtatacggagattacagagcactcgaagccgtttaaaggtgccggtacggaggaagacccgtatgtctttctttgcacggaagatgctgtgctgacgaagggctttctcttgaagctgctcggcgtgacagacccgcgtgcgacgcctacccctaccccgacccccacaccgagcgcagagcctacggcacagccgagtgaagtgcccacggcggcgccgcagccgacggttacccccgaaccgactgcgaagcctaccacagcgccgacggaagcccctactcccgcgccgcccatagaacccacggaagcccctactcccgcgcccatagaacccacggaagcgccaacggtttccggtatggcgtggttcaagcagatgacattcacaaaaacgaatgagaccggcggcgaaagcgtacccacgccggagcctgatttcacactgccggacggcccgtttgtcgcacgctttgaagtgcatgaacaggataacgaaaacctgccgcttgtaaagggctggcagatggacggcgataagatttccgcgggcttctttaatgaagttatcagcgagccggatgacattcaaatgccggatctctcctacgccgatccgggcatcagctacgataccggaggctccatgtatacggcggaagaattgcagcagatgatcgccgataaaaagcagcagattcaagatttaaagctgaatgtgaagcaggcggcgcatgaccttgaaaaagcgaagctggatcttgaaaacgctacaataaaatcgaccgtgaacggcgttgtgaagtcactcacagatctcgatacggcgatgtccacaagctccccgttcctcgtggtttcgggcggcgacggtttctatataacggcatccttaaacgaatcgctgctcggcaaggtgcatgtcggcgacacggtcatggcgagctcttgggagaacggacaaatgtatgaggcagagattgtacagatctccgattttccgaatgacaattccaatttttactatgacggctcctcaaacccaaacagctccacgtaccagtttacagcgcgcattgccgatgcggacggcctgaaaaacggcatgggccttgatattactttgaaggcggcctcggataacgcaagcaatgcaatatatctttttaaagcgtatatccgcagcgatgacggcggcaagtatattttgaaggttggcgacgataaccgtgtgcataaaacgtatatcaaaaccggcaagacgatctacaaccagtatctggagatcaagagcgatactttgacggaagaagattatgtggctttcccctacggcacttcggcaattgatggcgccaaggcgaacggcatggaagaaaacacagacgaaaatgacggcatcgacgcaaggaggcttgacgcatgattgaaaatatcagactttcatttcagggaatctggtcgcacaaaatgcgctcgttcctgacgatgctcggcatcatcatcggtatcgcctctatcatctccatcgtgtccaccatcaagggcacgaatgagcaaatcaaaaagaacctcatcggctccggcacaaacacggtgcagattcagctgtatcagggcgattatcagtacgaaatgctgtataacggcttgccggacggcatccctgtgcgtgacgagaccacgatggaaaaaatcaagtccgtaaaaaacgtggaagatgcggcgttctataccagccgcagcgactacaacaactccgtttactacggcaacaacggcatttccggctcgcaggtcttcggcgtggataacagttatttcacgacgaatgggttggtgctgaaaagcggtcgcacctttgtggacagtgattttacggatttccacgcggcagccatcatcgatgccgatacggcggattcgctgtttgacggcgaaaaccccatcggaaaaacgatcgagatcagcagcattccgtttacggtggttggcattgtggatgaagacagcaagtttgagcccgtcatcaactccatcgatgagtattatacgtattactcggatagctctgcatcccgtattttcgtgccaagctccatgtggccggcgctctattcgttcgatgagccgcagaacgtggccattcgcgtttccaatacggaagccatgacggatgccggcaaggctgtggcggagatcatgaacacgaacgtgacgaacagcgagatcaagtatcaggcacaggatcttttaaagcaggcgcaggacttgcaggatctcagcagctccacaaattcgcagctcatctggattgcgagcatctccctgctcgtcggcggtatcggcgttatgaacatcatgctcgtttccgttacggaacgtacgcgagagatcggtctgaaaaaagccatcggcgcgaaaaagagccgcattctgtggcagttcttaacggaagccgctgtgctgacaagccttggcggcattgtgggcgtgggtgccggtatcggtcttgcggcaatcatatcgcgcgtgacgtctgctccggttgccatcagcgtgccttccatcattattgccgtggtgttttccatggtcatcggcatcatcttcgggcttctcccctccttcaaggcggcaaacctgaacccgatcgatgctttgcgacatgaataaaaactaaagatttataaaaatgcccgccgggctttccgatcacatcggtcagcccggcgggcatttttgtgttttgaattactctgatttgtcctgctctgcagcctgaagaaatacttcgtgccatgcgggaaaatgcttctgcatacggatcggctttaacgcgggtgttgtgaagcagtgctgcgaagtgccggtgcaactcaaaagcccggtctccttgctgtgcccctcatacgccatttcaaagcgtacaccgttgtagttttgaatgcgcagtgtaagcacaagcgtctcatcaaagcgaattgggtgcttgtagctgcacgaaacatccagcacggggatcagaatgccgttatcttccatttttttgtacggcaatcccatagcgcgtagcatctccaagcgggcttcctcaaaccaacgaatgtaattcgagtggtgcacgatgcccatttggtcggtctcgtagtaattcgctttgcgttcaaaggtgaacatggcgcggcctcacaggtgcatttcgatgaggtttgcgtaaaaagccttatcgtgtgcgccgacttcggtgtggatgggggcgccgtctttaaagaggatgacggtcggaatgctggagatgccgtattcggcggcgatttcctgcgcttcgtcaacgtcgatcttcgcgacgacggccttgccctcgtattcttctgcaacttcctcaatgaacggtgcgatcattttgcacgggccgcaccatgttgcaaaaaagtctacaagaacaagcttgttatcgcggatcaatgcgtcgaaattttcagctgtgggatgtacgattgccatggaaacttcctccttaaaatgatttgggattatactaaatttgtttaagaaatttattcgtagggtacgatttctgcggagagaatggtgacgtcttcaagcggcttatcgttcgagtcggtctcaacgcccatgatgctgcgcaccacgtccatgccgtcaaatacctgtgcgaacacggtgtgtccggtacctgcggtggaatatgcaccgtcaaggtgtgtgttgccgccgtttttatcgtaaagttctttgtaggcatccgttaccttatccatatcgagcgtgccgccgtatatggaggtgaactgttccggtgcagatttatagacctgataatactggtcgtaggtatcccagtctattttgcccggttccgtgcagtttataaaaaactggctgccgtttgtgttggcaccgctgtttgcgcaagagaccgcgccggtgatgttgacgaggttttcgtgaaattcgtcgccataattctcgccccaaatgctctcgccgccggttccgttgccaagcgggtcaccgccctgaatcatgaaatcatcaatgacgcggtggaaagtgatgccgtcatagtagccggaaagcgccagagatttaaagctgtacacggctttcggtgcggcatccgggaaaaagcgcatgcgaatggtgccgtagttcgttgtcagcacacaaatctcctcgcctttttccggcatatcgagctgatagccgagcttttctttgtcggcctttgccaagggctttaaggtatctgccgcaacaactttatccgtagtgccgatgaccttttctgcggcagaagaggtgctgccggagcaagctgtgagcagcatgattacggtcaacgccgcacacagcagtttcattttcttcatttttctgtttcctttcttttgcaaagacatactttgcatctgtatatctattttaatatacacggtaaaaacatgcaagcccttttgtttatcttcatgaaaagttcagaaacgcataaatgaaagtttaggttcatatacttcggcgtagttaaggcgcagccgaaagcgttttttgcgcggcacggccttaaaaaggagtgaagtacatgaaattttacccggaaggtcatttgatcgacaaagcggaaaacaaagccagtatgcagacgcctgccgccctctccgacgcaatgcgcgacggaaagatcttagaggcgcgcagcatcatctgcgacaacgagcacaacctcattgtagatctcaaatgtatgcggggcattatcccgcgcgaagagggcgcgctcggcatacgcgagggcacagtgcgggacatcgccatcatttcacgtgtgaataagcccgtgtgctttatcatcacggattttattcgtgatgcgttcggcaggatcacagcggtgttgtcgcgccgaaaagcacaggagcgctgcatggcagagtacatagcagggcttacctgcggtgatgtgatcccggtgcgcatcacgcatttggagccgttcggtgcgtttgcggatatcggctgcggtattgtttccctcctgcccatcgatgccatttctgtttcgcgcatcgaccacccgaaggagcggttcacggtcggcatggatattcgcgccgtggtgcgtatgaaggacgagaaccgcatcacgctcagccaccgcgagctgctcggcacgtggacggaaaacgcggagcgctttcgtgtcggcgaaacggtcgcaggtatcgtgcgcagcgtggaaagctacggcatttttgtggagctgaccccaaaccttgcaggacttgccgagctgaaagaaaacgtccatgccggacagcaggccagcgtgttcatcaaaagtattctgccgaaccgcatgaaggtgaagctcgtgcttgtggaatgctttgattacacctataaacccgagccgcctgtatatttctttcagggcgaccatattgataagttcacgtattctccgcccgagtgcgcaaagcacattgagacggtgtttgcgtgatttaggacagcaaaaggcggtctgcacggattttttctacccggcagaccgcctttctatgtgtctttaaaggacatttgccttaacgggtgtgattactttgcttcgctttcgctcgacttttcgtcgccgctcttctttgccttgtcttcaatgacgtacttaccgtctttgaagtcgcagacatacgagccgcccgctttcatgttgccctcgagcatctcttcggaaatcgggtcttccatcttgctgcggatcgctctgcgcagcggtcttgcaccgtaaaccgggtcaaaaccggcgtttgcaacagcttccacggcagccggggtgaactcaaccgcgatgtccatgtcgcgcagttgacccttaagaccctcgagcattttgccggcgattttctggatgtcgtcgtgcaggagcttacggaacacaataatgtcatcgacacggttgatgaattccggacggaacaccttcttcagctcacccatgacgagctcttttgtgcgctcgaaatcggcgactgcgctgtcttcttctgtcgacttgttgtccgcggtggcaaagccgagacgctcttgctgcttctctgtaatgagacgtgcgccgatgttggaggtcatgatgatgatggtgttcttaaagctgaccaccttgccctgcgaatccgtcagacggccgtcatcgagaatttgcagcagcatgttgaagacatccgggtgtgccttttcgatctcatcaaacagcacaacggaatacggcttgcggcgcactgcctcggtcagctgaccgccctcatcaaagcctacatatcccggaggcgaaccgacgagacgagacaccgtgtgcttctccatatactccgacatatcgaggcggatcatggccttttcgtcaccgaacatagcctccgcaagcgccttgcacagctcggtcttgcctacgccggtcgggccgaggaaaatgaacgagccgatcgggcggttcttatctttcaggccgactctgccgcgacggatggcttttgcaatggccgtaacggcttcatcctgaccgatgacacgcttgtgcagcgtatcttcaagatgcagcaggcgctcgctttcttcctgcgtcagctgtacgaccgggatgccggtccacatggcgacgatctcggcgatgtcttccgccttcacaacgctgttgctgcgctcgttctttgcagcccactcgttctttttctgctccagctcctctgtaagggctttctgcttgtcacgcaactcggccgcgcgctcgaagtcctgctcgttgacggcagccgccttatcaatctcgacttccttgatgcgcttttccatctcctgcaggtcttccggcgcagtgaacgttctgagacgcacacgggacgccgcttcatcgacgaggtcgatggccttatccggcaggtaacggtctgcaatgtagcgcgaggagagcttaacggcactctcaatggcttcatcggtgatctgtactttatggtgcgcctcgtagcgatctttcagaccttcaaggatttgtaccgcttcttcttcggtcggctcaccgacatgtaccggctggaaacgacgctccagcgcggcatctttttcaatgtactttctgtactcgttgatggtcgtcgcaccgatgacctggaagtcaccgcgcgccagagccggctttaagatattggcggcatcggcagagccctctgcggaacctgcaccaatgatggtgtgcagctcatcgatgaacaaaatgacgttgccgtccttcttcacttcgtcgatggcggacttgatacgctcttcaaaatcgccacggtacttagagcctgcgaccataccggtaagatcaagagccaccagacgcttgcctttcagcagctccggcacctcgccttcatgaatcttcagcgccaagccttccgcaacggcggtcttgccgacgcccggttcaccgatgagcaccggattattcttcgtacgacgagacaagatctgaatgacacgttcaatctcgttatgacggccgatgaccgggtcaatcttgccttcggctgcgagctttgtcaggtcgcggccaaacttttcaagtgcactgccgccttccttttcgccgttttcgtccttcggatacgcgttgccggaagctttatcgacggtataaccgtcggaaagcgccgaggacaacgcattcgcaacgctctgcgggtcaacaccgagcatctgtaagaagcgcacagcaaagctttcaccgtcttcaatgatggcgatgagcaggtgctccgtgccgacatagttgctgccgagcttggaggccgcgagctttgccatctgcaaaatgcgctttgtgcgcggggtgaaatatgcggtggtgaggttcgtcggcgaagatgtgccgatcttctcctgcatcaggcgttcgtaatcgtctgccgtgatgccgagcttattcagcacgttgaacgcaacgccgctgccctctgcaatcaagccgtatagcacgtgctcactgccgatgtaattgtggccaagctcctctgccttttcgatggcgcggttcatggcattgtttgctttctctgtaaaacctgtgaatctatacatataaatccgtcctttcgatcactgccgtatcgcagttctctttactgattttctattattgaagcgctttgagggctttgcgcacctcgtctgcgcggagaatgtctctttgtcccgccgaaaggttgctgccgtgtgcggctgccatggtggccggctgtaccgctacggtcagtgtgtgaatatcttcaagcgttataccgcttaaaagcttttccgcaatgccgaaacgcacattggagataagcttcatatattcatcgcaggaaagcagccgtgcatttttcagcacgccggcggaacggcctactttgtcctgcacattgatgttcttgctgagcgaagcgcgcgttttgcgctcttcggaaataagctgcatcgtaatgttctgcaagttttccacagcctctttttcgctgagacccagtgtaatctggtttgaaagctgatacatggcgccgatgacattgctgccttcgccgtatgtaccgcgaatcacaagaccgagcttcgaaagattcgtggagattctggacattgcgccgttttcggtgagtgccggcagatgcagcatcacagaggcccgcatgccggtaccgaggttcgtcgggcactgggtgaggtagccgagctcggaatcaaacgcaaaacgcagcgattcgtttaaaagcgtatcgatgcggtctgccatttcggcagcttcgctgagcgcaagaccctcatgcagcacttgaatacgcacgtgatcttcttcgttcaccataatggagatgcactcgtcctttgagatgaggaatccgcgtccctttgcgtttgcgatgaactccgggctgacgatgtggcgttccacaagtgacaccgcctgctcgttgctgaggtcatccatctgcacgaagtcgaaatccgatgcgatggcgctgttgccgctgaggatcgcatcgcgtacgcggcgctctacggctgctttctggtcaggcgtcatgcggtttggaaacggcatatctgcaaggtttctcgccagacgcacacgcgtgctgatgacaacgtcactttctttacctgctttttcataccatttcttttcttcgttaagcatggttcccatctcctttctccatttctttgatttcgtcacgcagctcagctgcatgctcgaagtcctgcttttcgattgcttctttcagttccgcacgtttcttttcaatcggcgtgggttcttccacaacggcaatcttacctgccggttccacaatgcgcagcgcattgcttccgggtactttgcccttgtgctttgctgcaccgtggatgcggtggatagtcggcatcaggcggtcacggaacacattgtaacactctgcgcagccgatcttgccgctttctgcaatctcctcaaaggaagcaccgcatttcgggcagcgcatcgcattactgcgcccggtcggcgcaccgatgaagctgccgagcagattgttgaaatcgaagtccatatcatcaaagttaaaaaagctcttgtagccttttgcccttgcacattccgagcaaaggtcatattccgccaacttgccgttgacgatggttttaatgtgggtcgttgccggattctttccgcagttctgacacatcataagtcatcccgtcctttcaaaatggctttttatacatttagtacgagcaacatgtttttgaagatcgatgcccgcagttgatctcgaatttcttttggcgccggtgcaagtgccgaatccgaaagccctgccatcatcaggtgagcgtcggattcggacgcaacgcccgtttccacaagattccgcagcatggcgcgcatagaagctgcgtccagcttaggcccgatggaattgacaatgtgcatgattaaatcggattttgtcatgctccggcgaatgatgcgaatgtaaccgccgccgcctcgcctgctctctacgatatatccctgctccggtgtgaaacgggacgtgatgacgtagttaatctggctcggtacgcagcccagcgtgtttgcaagctcattacgctggatctccgcgatgccgttttcatcattgagcatttgtaagatgtaattcgcaacgctgtcgctgattcgcatttctgatcgcctcttgttctttctttgtctttgactttccttgactttaattataagcaaaacgaatgtattgtcaagcgtgattttatccgattttccgtaattacattaaaatatctctctatttcaaattaattctcagcaatactaactgaaatgcatgaatttaaaaagtttttgaagttttgatttgaccatcacacatttcccccactttcatattctgtattgtaaacgaaaggaggcgttcaatcatgtgtaacggttttggcggaggttgctcttggatcatcattatcatactgatcctcttgtgctgcggcggctgtggctgcggtaacgattgcggctgcaacaactgtggtggctgcaacaacggctgcggcggctgtggctgctgatcggtcgatcgcataatataaaagcaagccgactgagtgaaagcagtcggcttgccgttttataaataacacgtaaagtaataaaactttacacatcgccgagcatataaagaaaagctgtgcactccattagaatgcacagcttaattttaggactatgaaaagtaatttagctttacagacagctcgggactttgtaaccgtatgtattcttcttatagttgccgttagagggcgatgcctcggcgtagttgccgtaggagaataccttagcttctgcaaggcgtctataatacaggccgatgtagcagttgccgcctgccacatgccaatccagcagattgctgccgaatgtgtaggcgtccacatagttcaggtcatgcgtgagaccagaggtgctgttgaaagcaacatcgcctgcgcgcacccaaccgctcttgccgcttgcagagaccttgtaccagctctgcttcgtgcttgagtcgcggtaataatcgaggatgttcacacttgtgctgatcttaagcgtagtaatctgcgtggaagaagcgctgtggtcctgatacatgggtagtgtggaagccgttaccttaccgccgtacggattggaagaagacagatcctgcggcggaacaacggtgttcatgatgactgtacgcacgtagcagttgccggagccgttccagtagcctgcgccgacattgtaagagaagcttgcaagcgcatcaaactggcactggctcatcaaaaggccgttgctcgagatgaaacggttgatctctgtggtgtaagagccgcggttgacggtatcggccagcatggcctttgcttccgagcgggtcaggttattgtagaatgtggtgttcttggaaacaacgtaaccgtagccgacggtcgggatattgccggcaagcgtgtccggcgaaacctgtgggacatagccttcataagaggcgatgttgtcgagcatactgtcacttacgcggcggctctcgcctgttgtcgtatcggaatccgttgtagagacgacgaggatggtgaactctctgtaatcggaggaataaccgccgccggaagacgaatacgcacgcaccgtgtaggtgccaggtgtactgattgtagccgaagcagagaaaatacggacgttgttgtcgccctgactttcggaatcgtaggacgtggtatcgtaggtgccgacgccatcaatctcaaagcgcacggcggatttctgcgtatccgtaaccgccttcaaattgaaggatgaaccggctgtgataatattcggtgttgtgtacgcaaagcggacagcttccggcgcggagaccgtgacggaaacggtggcaagtgcagtgccatttgcgctctttgcggtgatcttggccgtgcccggcgcagcgccgtaaatgaagagctgaccggaaacaccggcttttgccgttgcaacggaagcatcactgctctcccacgtgacagagccggaagaagaagcctgaatgtagatggtcttatactgtgcgagatcgacggaagaaacagagatcgatgcactggacgaagacgggtcatatgctgtgacatattctgccgagacatagccctctgcgccgccggtcgtacgcacatgcacccagccgctcgttttgcggtcaagcacgttcagcacggtgccggtgctcaaaacggtgagtactttacagctcgtgttcggctcggaacgcaggttgaggccgaccgtaacgcggacgtattcgtctgttgcgggtgcattggagttgttgccgttattggtgttatcatctccactgttaccgggctttacggagttgatatcgccggaggtaatcttcaagtactgcgcagcaaggtagccctctgtaccgtcggaaagcttcactttgtaccagctgctgtttgtggcttccgtaacggtaacgttaacgttcatatcgataaccttgatgatgccatagcttgtgccggggcctttgcgcacatttaaatcggatgtggtcttggcctgtacggttccgttgctcggcgccggggtcggcgtgggcgttgcggaaggcttggcagaatcaatattgccggaagtaactttcagatattcggagaacagatagccctctgtgccgtccgaaagctttaccttgtaccactggctgttcgacgcgtccgtgaccgtaacggtggtgccggtgccgatgaccttgatgacaccgtaattcgtacctgcaccgcggcgcaggtttacgtctgcggtgagcttagcctgcacagtgccatcattggacggtgcctgcgtaggtgtaggcgttgcggacgacgtgccggtgaccttcaaatactgtgcaaagatgtagcccgtggagccgtttgcaaggcgcacggcataccactgagagttgctcctatctgtgaccgtgacggttgtgccggaagcgataacgcctttagagctgtaattcgtgccggggccggaacggaagtttacgtattccgtcgttttcgcgctttgctcggaaccgctcggtgcctgtgtcggtgcgggcgttgccgttgcggaggaagaactgtttagcttcaaatattgcgcaaatatgtagcccgtagagccgttcgagaggcgcacggcgtaccactcggaattgcttgtgtcggtgaccgtaacggtggtgcctaatgcaatgacgcctttagaactgtaattcgtaccggggccggaacggaaatttacgtattcggtcgtttttgcggtctgctcggaaccgttggatggcgcctgtgtaggtgccgccgtaacagacggcgtattgctgcccgtgaagctgatgtattcggcaaaaatatagcccgtagagccgttcgagaggcgcacggcgtaccactcggaattgctcgtgtcggtgaccgtaacggtggtgcccaatgcaatgacgcctttagaactgtaattcgtaccggggccggaacggaaatttacatattccgtcgttttggcactgcgttcttccccgttgcttgtgctgccgccggtagacatggaaatatactcggcgtagatataacctgtagagccgttagaaagacgcacggcgtaccactcggaattgctcgtatccgttaccgtgatggtcgtgccggaagcgatgatcccctgcgagctgtaattcgtaccggggccggagcggaagttcacgtattcggttgtttttgcggaaacttcttccgcataggccgcaagcggcagcgcagaagccaatagcagcgcggaaagcaacagagccgtgcccttctttcggagcattctttttctgtattgcatgtgttttcacctatccttatcaaggcatcgacctgtagaagcaaaagccggtttctgtcctgttgcggcagaatatggtacagatcgttttatacagttacaatcatagcacaatagttacaaatttgcaactatttttgcggttcaaaagccaaaaacagaaaataaacccgcaattttcgcttaaatatgaaaaataccggacccgtaaaaacggatccggtatcgaatttcaggtgaaattacagcttttcaacgatggctttcgtatcgcgtgcaatgacaagttcttcgttggtcgggacgatgtaaacagcgaccttgctgtccggcgcggagattttcttctccttgccgcgaacgcccttgttggcttcgtgatcgaacttgatgccgaggtattccatgttggtgcagatgcgctcgcgcagggtatcctggttctcgccaagacctgcggtgaagacgattgcgtctacgccgttcagcgcagcgacatagctgccgatgaacttctgaatctgataaacgagcatctcatgtgcgaggtgtgcacgctcgtcgccctcgtcctctgccttgcagatgtcgcggtcatcgctggagatgccggagataccgagcaggccggacttcttgttgaagaggtcggaaagctgtgccggggtgaggttctctttctctgcgatgaacgtgacaacggacggatcaagcgtgccggtacgggtacccatcatgaagccgtcaagcggggtgagacccatgctggtgtcgatgaccttgccgttcttgatggcggtgatggaggaaccgttgccgatgtggcaggtgataagcttcaaatccttgatgtccttgcccatgagctctgcaacgcggtggctgacatagcggtgggaggtgccgtggaagccatagcggcggatcttgtacttctcatagtactcatacggcacagcgaacatataagccttctgcggcatggtggaatggaaagccgtatcgaacacgacaacttccgggacttccttgccgaaaacgctcatgcaggcacgaatgccctgtacatgtgcgctgttgtgcagcggtgcaagcgggatgaggctttcgatgccctcgatgaccttttcgtcaacgagaacggactcgctgaagagcgcgccgccctgaacgatacggtgaccgatagcagcgacttcgctcagatccttaatgacgccgacttcactgtcgagaagtgcgttcttgacctgctcgaacgcttcggtgtggttcgccatgcggatttcgatcttcttctctctgccgtctgccgtcttgtggccgaaaatgcccatttcaaggccaatcttctcgcagttgccctttgcaagcatttgctcgttgtccatatcgatcagctgatacttaagtgaggagctgccggcgttgatgaccagaattttcatttcgtcttccccctgaatcatggttaaatttgaattggatcatctgtgcaaacgcacaaaaaataagcacgacacttccaaaattataaataaggaaacgcggcttgtaaattgatcttcattgctttatacttatgataatacaaaatcatgtaaatttcaaggagtttcctataaaatgattggaaaaaacaagatttcgggcgttgtttgcgagtttaatccgctgcataacggccacgcggcactgctctcccgcatgtcggaggagttcggcagcgacattgtctgtgtgatgagcggaaattttgtgcagcgcggcgaggcggctgtgctcgataagtggtcgcgcacacggctggcactgcaaaacggcgcggcactcgtgctggagctgcccttgccgtgggctgtggcaggcgcagaaaaatttgcacgcggcggcatttcgttattaaatgcgctcggctgcgtagatacactgacgtttggcagcgaaaccggtgataccgctcccctcatgcactgcgcggaatacttgcactccgatgtgtttaattcggatattcgcccggaggttgcaaaaggcgtttcgtttgcagcggcgcgtacggaggctgtgaaaaaggcactcggcgcagaaaccgcagagctgctcacaaagccaaattgcattttgggtatagagtattgcaaggcgatcttatcgttgaattctaatatcgtgccgcagactgtgcagcgtatcgcgattgaccacgacagcgacaaagcgcacggcgcgtttgcatcggcgagcctgatccgcagcaagagtgccgagggtgaagagatttccgcgtatgtcccggaaaatacggcggtgtgtattcgtgcgctgcaaaaggaaaagcagtaccccgcttccctttcgtatctcaaccgtgcggtgctggcggctgtctctgccatgtcacccgaagacctgcgccgcgtgccggatgtttcagagggcattgaaaaccgcattttggcggctgccgaaacggcggaaacgtgcacagggctgtttgatgcggtgaaaaccaagcggtacagtcacgcgcgtattcggcgtattgttttaagcgcgtatttgggcatcacgaacgatctgcccaatttgcctccctacctgcgcattttaggtatgacgagccgcggcgcggagatcctgcacaaagcgaagccgatgctgccaatcatcgcacgccctgcggacgtgaagaagctttcgccggaagccagacgtgtgtttgcgttggaagcgcgcgcggataatctttacagcctgtgcacagagcatcgccgccctgcgaacatggattatacagaaaaactgattcggatataaactgagctctgcatttggcttttgccggtcgcagagctcttcttttatacaaaaagaccgaaccacgcgggctcggccttttgaatgttcaaatattcgaattacttctcaagcggtgtgacttccacagtccaaccgagggtatcttctaccttaccggtctggatgccggtgacggtgtcgtacagcttctggctgaattcgccgatgccgccgtccttgatctgcatgacttcgttctcgtaacggagtgcgccgaccggggagataacggctgcggtaccgctaccccagcactcttcaagtgcaccggtacgggccgcctcaacgagttcgtcaacggagattcttctctcttcgaccgggagaccccagtgcttgcagagatcgatgcaggatgcacgggtaacgcccggcaaaatactgccgttcagcatcggggtgacaacggtgccgttgattttgaagaagatgttcatagcaccgacttcttcgatgtacttgcgctcaacaccgtcgagccacagaacctgagagtaaccttcgtcgtgtgcctttacctgtgccgcgaggcttgcaacgtagttgccgccggtctttgcttcgccgatgccgccgcggactgcacgtacatagtcgtcttcgatccaaatctttaccgggtcgaggccgctctcgtagtaagcgccgaccggggaaagaatgatgatgaatttataggtgttcgacgggcgtacgccgaggaacggatccgttgcaatgacgaacggacgaatataaagagaagtgccggggcggctcggaatccaatctgcgtcaacggcgacgagcgtcttgatcgcattgaggaaatcatcggccgggatctccgggatgcaaagtcttctgttggagttgtttgcacgctcgatgttcttgttcgggcggaacagacggatgcgaccgtctgcgcatttataagccttcatgccctcgaacatttcctgaccgtagtggaaaaccatagcggacggatcaaggacgatcggctgatacggcatgatcttcggatcgtgccaaccctgctccgggttatattccatcacatacatgtgatctgtaaagattttaccgaaaccgagcttgctttcgtctgccggcttcgctttaggcgcagtggtacgctcaatctggattttctgcatcaaaaaacacttctttcctgtttgcttatacacattttagcacgtatttgccttttttgcaagttaccgaggtttaaattgcaaaaaaagcttcacaaataaccatttggctttgcgaagctttctgttctttttgtataaacgaatgcacctttacaggtgtgtgcgcagcccctttgggtaacgattcttcaaaacaccgttcgatgccttgccaaagcccgttacaataccgtctgcggcgacggcggtgtaaccggaaagcccctctgcggggatttcttcgccgcgcaaaaacgcgaataaagcaggatcgttcgatgtgagatgcagcacgctgcggcagttttccgcacggcttgccatgaaaatgccatgcgcgggctcgatgcggttcttttttgcctcgccgaattccacaccggcgcgcagaacggaaagtcctgcaatgtccggcagctcatttggcaataagatcacacggtcgcgcacgcgctggaatctgcccggtacatcggtaaacagagatgtgtacaattcttcggcatgcgcctgcgtctctcggtcgggcttaaagctaaacggcgcaaaacgttcttcacatggcgcaacgcggcggaagcgcgcggcaaagtgcccctcacctccgtccatcgggaaaatgcgcacagcgtctacgccataggccgggcgaccgaatgtgacattcggcttttcgagcacgaattccgggtggctctcgagaaatttctgcacaacgccctcattttcttccgtggagaatgtgcaggtagagtacaccaaaatgccgccttcgcgcacgcactgtgcggcggaggataaaattgcgagctgacgtacagcgcaggtctccacgtgctcaggactccattcctgcacggcaacgggatcgcggcggaacatgccttcgccggagcacggcgcatcaacgagcactttatcaaaatacccgccgagcttttccgcaagcatctccgggtatacgctggaaacgactgtattacgcacgcccatgcgctccaaattggaggataaaattgcggcgcgattgcgcacaacttcgtttgaccacaaaagcccggtgtcgccggtcagcgcggcaatctgcgtggatttaccgcccggtgcggcgcagaggtcgagcaccttatcccccggctccggcgccaaaagcgtgacggccgaagacgcggacggctcctgcgaataaaacgcgcctgcatgatagagcggcagcgccgccattttggtatctgtcggcgcataaaacgagagcggcgaaaacggcgtttgcaccagtgtaaacggcagtgcgcgttcaagctgctcttttgtgcattttacagtgttcaaacgaatgccgcgtttgtgcggttcgttgtaagacgcccgaaacgccgtatattctgccccaagcatatcctgcattcgtttttcaaaagctgcgggcaattccatggccgccccacctttcctaatttcataaattcggtacataaacgcgtgtaccgtgcgcataatagctttcggaaggggtgaatcacatggcaaattccgaaaacaagaattacacaaacaaaaaccagaaacaaagccgcaataagagcgaccgtcagacaaccgaccgcgtgaataacggcacggaaaatcgtacggaaaaccgcagtgaaaaaagctgccggtaacacaaaaaaccggaaaaagcaggcaggcgatgcgcttgtctgctttttctatgcggatttattctttcggctcgctgaccggcttatcgcccgtcttgcgaatagctttgataatctcgccgagcgtgcggtcgtcggagcgcacgggtttgaagccctcaccggcgatttcaccggcatcgccgacgatgacgaacgcatcggggtcttcctcgcggatgatctcgctgatgcggaacacctcaaagcgacgcacggcgcagaagagcacctcgccgtcctgcttcaaatagccgctgcgggacttgagaaacgtcaggccgcggtccatctccttaatgatgcggtcggcaatgacatcgtttttatgggacataatgaaaaacattttgccgttgcccgcatctgtgccgtacagaattgtatcgatgatttttgtcgatacaaaaatgacgatgcacgcgtacacggcgctttcaatgctcttatatacgatggcggaaaacagcacgacgcagccgtctacggcaagcatcagcttgcccatggaaagatggcgcaggcgatgattgagcagacgcgcgatcatgtccgtgccgccggtcgtggcaccgcgcataaagacgagtgaaagacccacgccctcacacacgccgccgatgagtgtgatgatgagtgggtcaccgtggtagaccggcatgaacagtgccacgatgtcgatgcaggcagcgtttaacacgaccgccaacatcgttttggtgacgagcttataaccgatctcaataatcgcccaaatgatgatcggcacgttaataagcaaaatcacggtgccgacgggcgtgccgaatagataattcagcacgatggcgataccgctcacgccgcccggcgcgatgttgttcggcgcggtaaagccgttcaggccgaccgcgtaaataacggaacccgccgtcatgaaaatcaggtcaagcagaaattccttcacgttttttgcaactttatttttgcgcatgtgcggtttcctccgtttctgcaaattcaaggatcttatcgaagaaaagacgcaggcgctccagctcgcctttaaggtaaagatagccgaaaacgcattcaaatgctgtggctgcgtggtaatccgcaacgcttgagtttttcggcacgtgcgaaacgtgcgcattgcgtccgcgcaggcagacttctttttcctcttccgtgaaaagcggcatcagcacttcactaagcaccttcgcctgaaactcgcaacgcacgaacgaaacggcgcggctgtgcagctttttcacggggcagttgcctttggagacgatatattcgcgcacgaaaagctcgtacacgccgtcacccacataagcgagcgttaaggggcttaactgcttcggatccgattccgtttgatagaacttttccaaatagccaccctcttagtttacaaaatcaaattcaaggtcatacatgctgaccgtgtcgccttcctggatgcccgcctcacgcagcgcatcgataacaccggtgtgaatgagcacacgctggaagtactggagcgactcgtaatcatcgaaatcgacggcggagatgagctttaagagccaatcggcctcgacaaaatacacgttgtcctccacgcggatatcgacctttgccttgctgctgaattcttcgacaggctttaccggctccggttccggctcgaaatgcgcgaccggcggcagcgtggaaagcatttctgcggttttattcaaaagcgggtcaacatcatagcggattgccgccatgattggaaagaattcatagccttgcgcctcgacaaacttgcggaaatcctctacctgctcgtcggtcgtcaggtcacatttattgccggcgaccagcatgggacggttcgcgaggtcggggttgaatttgcgcagttcttcgttgatgatgcggaagtcctccttcgggtctctgccctcgctaccggaaacatcgacaatgtgaatgagcatgcggcaacgctctacatggcgcagaaattgatgaccgaggcctacaccctgccatgcgccctcgataaggccgggaatatccgccatgacaaacgatggcgcgttcggcatatgcaccacgccgagcaccggggtgatggtcgtaaagtggtagtttgcaatgttcggtttcgcttcacttacaacggaaacgagcgtagatttacctacatttgggaagcccacaaggcccacatcggcgagcagcttgagttcaagctgaagctcgaatgcttcaccgggtgtgccgggctttgcaaagcgcggagtctggcgcgtaggtgacgcaaaatgcgtgttgccccagccaccgcggccgcccttcgcgataacgacgtcttcgtctgtggacatgtccgccatgatgcggccggtctccacattgcggatcagtgtgccgcgcggcacggtaatgacgagcggctgtgcgcttttgccgaagcagcgctttccgcgaccgttttcgccgcgctctgcggtgtacttgcgcttgtagcggaaatccgccagtgtggagaggttatcgtccacgcggaacacgatgtcgccgccgcgaccgccgtcgccgccgtccgggccgccggaagccacgtatttttcacggtgaaaagccacggcaccgtcgccgccgtcaccggcttttaccttgatcttagctatatcgataaacataattcatcatcctttcagcgccgcggacggctctgtacaaaataaaatgggcttctccgctttacccgaagaagcccgtttcatcgtatattcggggatacgaaaccggtattcccccaagggtcaaaattactgctcgatcgagtaaacgctgaccttcttgcggtcacggcccatacgctcgaaacgaacctgaccgtcaatgagcgcgaacagagagtcatcagagcctctgcctacgttctcacccggatggatgtgcgtgccgcgctgcttaacaagaatgttgcctgcgagaacgtgctgaccatctgcacgcttgacaccgagtcttttggattcggaatcacggccgttcttcgtggagcccataccttttttatgagcaaacaactggatattgatcttaagcattttgttgccttcctttcgttttattgtcagacttctgcgtagcgtacctgtaagttttcggggtactgctcctctaaaccgagaagatgcagcttaaatccctcaaacaggctgcggcatgtccgtgcatcggtatcggaaactctaaacagcatctcgccgtcctctgctcgaagagaaatcggtgtgatgtgtaaaatctccagcacggtgttcgccgtcatatacgccgcagaagaaaccgcagcacagagaatgtcttctccctcctgcgccagaccggaatggccaagcacggaaaaaccgagaagcgctccgtctgcatttgcgaaaaaatccgcacgaatcatacgatcaaattagccctgaacggactcaatctgaatcttcgtgtagggctgtctgtggcccatcttgcgcttttcgcccttcttcggcttgtaagtgaggatcgtaaccttcttagccttgccgttcttcaggaccttgcctgtaacggaagcgccctcaacatacggggtgccgatttttgttccgtcttcgccgcaaattgcaacgaccgggaacgtaactgtctcgtcttcattggcagcgagcttctcaacgtagatcacgtcgccgtactgtaccttgtactgcttaccgccggtttcaataactgcaaacatttttttctgcctgccttttctgtaatctcgctactcgtaggcggactttcgtcacttttcagcccacagtaagcggctctatcatattaacatacactgaccctaaagtcaaggtatttcaaagggattttgtggttttttcttcaagcagcaacgcaagcttgtcgtcctgctttaccgctttgatgacgctcttgcggtctgcgatgcgcacgatcaaagcgaggagaaaattcaaaaaggtcaggaacgccagaaacaggcggtcacggcgcttttggcgcttcaatttctccgggtcgcgacggcctgcaccgttacgctgtgccttattcatggctcttatacgcttgttcacagtacaggcaacgatagcggtgcgctttttcatcgcacagcacgaagatctggtcgaggttttcctccgtgcttgtgatgcagcgcgggttcttgcactttacaacatttttgatgcgacgcggcagcacgatgttctctttcttcacaagctcaccgtttttaatggtgcatacggtgatgttgttatcgataaagccgagcacatcgaagttgatagcgaggtcgccttcaatcttgatgatatcttttctgcccagcttgctgctgcgggcatttttgatgagtgccacgcagcaatcgagcttatcgagctccaaaagctcgtagatgcgcatacccttgcctgcctgaatatggtcgatcacaatgccgttttggatactgtcgatgttcagcatacggtttcctcctcaaaaagtcccggttcgatgttcagaagcattaaaatgagcgccatgcggacatatacgccgttttgtgcctgcacaaagtactttgcacgcgggtcgtcgtccacttcgaccgcgatttcgttgacacgcggcagcggatgcagcacaataagatccttcggcgcaagcttcatcttttcagcgtcaagaatgaagctgtcttttaagcgaatgtaatcttcttcgttgaagaagcgctcgcgctgtacgcgggtcatgtagagcacgtcaagctccggcagaacctcgtccatggtacggacttctttgtattcgcagccggagggctttacgacttcatcgatgatatagctcggcacatgcagctcttccggggagatgaacacgaagcggatgccctcccagcgcacaagcgatttgatgagtgagtgcacggtgcggccaaatttcaagtcgccgcacagaccgatcgtcaggttattcagtctgcccttttcgcggcggatggtgagcaggtcggtgagcgtctgcgtcggatgctggtggccgccgtcaccggcgttgatgaccggcacgcgagcgtactgtgctgctacgcgcggcgcaccctctttgttgtggcgcatggcgatgatatccgaatagcaggataccatgcgtaccgtatcggcaacgctttcacccttggaagcagagctgttctgtgcacttgcaaagcccaataccttgccgccaaggcgcatcatggccgattcaaagctcagacgcgtgcgggtactcggctcgtaaaagagcgtggcaaggattttaccttcacacttgtgggcgaatgcggtgcggtcgtttgcaatgctgtccgcaaggtccagcagacgcagggtctcctcaaaggaaagatccagcgggtctacgaggtgtcttaactcattcatcttatctatgccttcctttcttatgtgcgccgtgtgttgcgttttatacgtggcgcaagtaaaaacaggctgtaaaaaacctccccggtaagcccagagaggttttcagcatcaatcttcgtcttcttcctcgggctcgttccagttgtgccagacctgctggacatcgtcgttatcctcgagtgcatcgatcagcttctgcatcttgagaatctgatcgggatcagtgagatccgtgtaggtatccgggaccatttccacttctgcggaaacaaaggaatagcccttagcttccagatcatcgcgaacgccgctgaaatcggacggctcagtgtagatctcgaacacgtcttcgtctgcctgaaaatcggaagcaccggcctccagtgcatcgctcatgacggcatcttcgtcaaaaccctcacgctccagcacgataacgcccttttcgttgaacatgaaggaaacgcaaccggtggtgccgaggttgccgccaaacttatcaaagtaatgacggacatcgcccgcggtacggttgcggttatcggtgaggcattccacgatgacggcaacgcctgcggggccgtagccttcgtaggtgatgctttcatatgcgttggagttgccctcgcctgcggctttcttaatgatgcgctcaatgttgtcgttcggcacattgttcgccttagccttcgcaatgacgtccttcagcttggagttcgctgccgggtctgcgctgccgccttctttaacggcaacggcaagctcacggccgatctttgtgaagatcttcgctcttgcaccgtcggtcttttctttctttctcttaatattattccacttggaatgtcctgacattgatgaaaacctgcctttattcacacaaattcaagttattatatcacagctcgcgcgcgatttcaatagcaatttcctgtgccttcgcgaaaatcgcagagttttcgcaatctgcacggtctgtgtccggcaaaaccaccgtttttttgagcgttgtgttcataacggaaaagctttggcgcagtgttttctcgcatacctccaccgcaaacggatcataccgccccatggtgagcagcaaaacggcatcgcggtgtgtcgcaatcgccgggcggataccacgggcaaatctagcttcaaaataccgctgaaaacggtcgatgaccgccttgaactgcgccggaaacgagaggttatagaccggcgtggcgatgagaagcagatcacacgcgcgtaggtcacgatcgaattcatcgaggtcgcgaaacgcgcagccgtctgctttttggcaatatccgcaggcgatacacggatgaatattcactttgcaaatgtcaagtgattttactttccagtcttttcctttcaatccgtcgagaaaagcttcaagcagcttctttgtgtgtccgtctttatgcggcgaagaaaataaaacgagtgcatgtttcatgtactggcctccgatcttgtaaagtaaaaagccttttcaaagctatttaactttacgcaaatgtaaaaagagcgctgtgaattcacacacagcgctctgtaaagaattatccttttacaacgatattgacgagcttgcccggaacgtagatctctttcacgacgttcttgccgttgatctccgctgcaatgcggtcttccgcctttgcaagtgcaatcgcgtcatccttctggatatcggctgcaacgcacagtcttgcgcgaactttgccgttgacctgcacaacgatttcaatgacgtcatctttgcactttgattcgtcgtacttcggccaaggctgctccgtgaccatgccctcgccgagcttcatttcgctccaaacctcttctgttacatgcggtgcaaacgggttgaggagcatcgtgaagacggagagctctgctttattgatggagcccttttccgcaataacgttcatgagcgccatcaaagatgcaatggcggtgttgaacttgaggttctcaatgtcataagagaccttcttgatggctttgtggaaagaattttccatctccgggcggatcgcttcgccgtcgacgagaatggactgcaggttccaataacgctcaatgaagcggcggcagcccttgataccggcgttgctccacggtgcggccttctcaaagtcgccgatgaacatttcgtagagacggagcgtatcagcgccaaactcgtttacaacgtcgtccgggttgacaacgttgccgcgagacttactcatcttctcgccgttttcaccgagaatcatgccgtggctcgtgcgctttgcatacggttctgcggtcgggacctggccgatatcgtagaggaacttatgccagaaacggctgtacagcaagtgcagcgtggtgtgctccatgccgccgttataccagtctacctgatgccagtagttgagtgcttccttggatgcaaaagattcatcgttgtgcggatccatatagcgcaggaagtaccaggaggagcctgcccactgcggcatggtgtccgtttcgcgcatggccttgccgccgcacttcgggcacgtggtgttgacccaatcggtcatcttggagagcggagattcgccgttatcggtcggctcgtaggaatcaacctgcggcagaacgagcggcagctcgctttcatcgatcggcacatagccgcacttctcgcagtgtacaatcggaatcggctcgccccagtagcgctggcgtgcgaatacccagtcacggagcttatagttgaccttacggtggccgatgccggtctcctcaaggtaatctttgatgcggactttcgcttcttcgacggtcatgccgtccagaatgccggagttgaccatgatgccggtgtcgcagtccgtgaacgcttctttctgtacatcgccgcccttaacgacttcgacgattggcaggtcgaacttctttgcgaactcccagtcacgggtatcgtgtgccggaacagccatgatggcgccggtaccgtaggaaacgagaacgtagtcggaaatgaagatcggaatggtggtaccggtcagcgggttgatggcctcaacaccctccaaacgcacgccggtcttatctttcgcgacctcggtgcgctcaaagtcggactttttcgcggcctctgcctgatatgcgcggacggcatccagattctgcagcttatccgcccacttttcaatgaacggatgctccggggaaacgaccatgtacgttgcgccgtaaagtgtatccgggcgggtcgtgtaaacagtcagcttatcgcctgcggtcgtgttgaaatcgacctcggcgccctcggaacggccaatccagtttttctgctgggtcttaacgcggtctggataatcgacaagatcaaggtcgtcgatgaggcgctgtgcgtaagcggtgattttcagcatccactgggatttgaccttgtgaataacttcactgccgcagcgctcacagacgccgttgacaacctcttcgtttgccagaacgcatttgcaggaggtgcaccagttgacggacatctcttttttgtaggccaaaccgttcttaaagagctggaggaaaatccactgcgtccacttgtagtatttcggatcaatggtgctgatctcacggctccagtcgaaggagatgccgagagactgaatctgctgcttaaagcgcgcaatattcttctttgtgatctcttccgggtgcacgtggttcttgatggcataattctctgccggtaggccgaatgcatcccaaccaatcggatagagcacattgtagccctccatgcggcgctttctggaaacaacgtcaagcgcggtgtacggacgcgggtggccaacatgcagaccctgaccggacgggtacgggaactcgatcagagcataatatttcggcttatccgaagtattggaagcatggaaaacaccggcttcttcccacttcttttgccacttcggttcaatttcactgggattgtacttgttcatattgattacacttacctctctgcgctatataaaataacaaaatcaattcggttcaaacgtcatgttgagcttttcgccgtcgagccacaggcgatccaaatcataaaaactgcgcgcttccgaggtgaagatgtgtacgaccaccgtttcgtaatcgagcacgacccaggaatcggagcgatagccctccacgcggtccggcgcaatgccgagctctttcagcttaaactccagctcgtccgccagagcatgcacatgcgtgctgccggtgccgttcgccagaacgaaataatcaccgagcgaggaaacgtccgaaatgcggatcacattgatctgatcggcttttttcgcatccaaaatgcccgctgcggtttttgcaagcgtcaatgaatccatgcttttagccattcctttctgcgcgctgcgcgatttttatgcttccttccgcttagttgccgtgccgcaaagcccacaccgcgtcattatatgcgtctatggtctccggcacgatgggcgcgcggtcttttgcgagctccgtaatggtgaacgcgatgccctccacaatagctttgtcaaggcttttatacgcggccttgcgcatatcctctacgccggggtaattgcggtctttggagatgaaatccgcgataaaaatgactttttcgagtaacgtcatgttttttctgcccgtggtgtggtatcgcacggcattgtaaacatcctcgtcctcaatgtgcagaacatgcttgatatacaccgcgccgctgatggcatgccagaactttttagcggaaagttcaacgtctctcataattataccaaagtccgcgagaattttcaactgtttctccgggggtgtatccttcaaaatatcgtgcaaaagccctgcaagctccgctttttcggtatcggcaccgtatttttttgcaagctttaccgcttcttccgaaacatttaaggagtgttcgaaacgtttttgcgtgagcatgggcttgatgatatcgatatattgctgtttttctttcttattcatgcgtgtaaagcctctttttttggatgtattccgcgacgcctgcgggcacaagaccgcttatatcttcgccctgcagacttttttcgcgcaccatcgtcgatgagacaggcaaaaactcgatgttctgcacggtaaagcgcagctgcgggaacttttccttcacttcttctccgtgtgtgacaagcgtttggaagctatccttgtcacgcggtgcggcgcagatctctgccgcggcgaaaatgcgctccgggtgataccacttttcgacggtgcagaacatgtcttcccccatcagcaaaaagagcgcatcgtcgggatattgcgctttcagttccgtcatggtgtctgccgtgtagcttttgcccgtgcgcagcacttcaatatccgagactgtgacgggacattcggcgatgtctgccgccgcaagcctgcacatttcaatgcggtctgccccgcttgcaagctgatgtgtcgctttgtgcggcggcgtgcccgtcggaatcaaaatcacgcggtcaagcgacagacgcttaataaactcccgcacaaggtgcacatgcgccgtgtggatgggattgaacgtgccgccgtaaatgccgatgcgcatggcttatgcctttttcgcacgcggcaggacgatcttcggatccttttcgttgcgtttataaagcgcaaatttggaaccgatgacctgcacgacttcgctttccgtctgctctgcgagcgcttctgcggcttcacgcggagagaccggcgcagtctccaacactttgcccttgatgagttcacgcttaaaaatagcgtctgcggcctgctttacgacatctccatcgatgccgcccttgccaatcatcaaaatggtgtcttcatttacggcgagcgagcggagatacgctctttgtttactggtcagcataatttatccctctttgtctttcaagtagttttcaagtttttctgcgaaaatacgcaaggatttccctcggtggctcacggcatccttttcttctgctgtcgcttcgccgaacgtcttgcccgcgcagccttcttcggtgcagatgaaaatggggtcataaccgaaaccgctttcaccgcggcattcctctgcgatgcgcccgtagcagtagccctcagcttcaagtacgtcgccgttcgggaatacacagcagatggcgcttgtaaagtgtgcgccgcgcttttcttccggcacgcccttgagctttttgagtaccgttgccttacgcttgcccggctcggcataccgtgcggaatacacgcccggctcgccgtttaaataatcgatcgataagccggaatcgtccgcgacgcacggcaggcccgtttcgtcacacgcggatttcgccttgatatacgcgttttcacggaacgtggtgccggtctcttccgcctcggtcagctcggtcgtctgcacggtgatgccaagcggcgccaaaatgcggccgaattcttctattttatgcgcattatgcgttgcaatgatcatgttcatacgttatccctccaaaattccgaaatcgcgtgcggcttgctgccaatgctctaaaagtacggggccgcccgctgcaagctcttctgcgcgctgcacgcagaaaagcgaataatttttgccggtgtaaagctgttttaaaatcgcatgcccccacacgcccgcgcgggtcagcagtccgctttcgcggatttccagtgctgcggcgtcaatgtcatacggcacttcgagcagcgtttcgttccatgtgtttccgtcggaatcgagcagcgccattttcgccgtgacggtttgcgtacactgcacgccgaccgcaccggggttcacgtacagcttgcccattgtgtgcgcgctgcacggctgatgcgtgtggccgcttaaaagcacgcgctcgtcgatttttaaaagccagctttctatcttataggagaacgggcgcagcgtgtcgcgcgttttttccggtgagccgtggcaaatgcgtatgggacacttgccgtttggatcaattgtctgcataaacggcaatacggagatgaactcgagatcctccgccgttagcccctcgtaggtgtatagaagggagcctgttgtagtgccgtttgcccaatcgctgccgaagttgtggtggttcagcacatattcttcgcggttgccgcgcacgaaccagcagggcatttcctgctttgcgcggtatattagcttcatagtctcgtgcgggtttgcacagtccgaaatataatcgccgaggaaaatgtacccatccgctttttgcttttccgcttccttcaggcaagctttcagcgcatggtggttgctgtgtacatcggaaaaaacggcgagcctcatgcttccggtctccgctcgaacagcgcgcgggcgaaatcctccgcgtcaaacggctgcagatcgtccacctgctcgccgacgccgatgaacttcaccggcaaaccgagatcccggtggattgccaacacaacgccgccctttgcggtgccgtcgagctttgtgagcacgatacccgtgagtcctgcggcttctttgaattcacgcgcctgattgacggcgttctgccccgttgtggcatcgagcacaagcaaaacttctttgctgcagcccggcagacccttatcgatgatgcgcgaaattttggaaagctcgtccatcaggtttttcttattgtgcaggcgtccggccgtatcacagatgaccacatcggcgtgacgtgccttcgccgcggagattgtatcgtacacgacggcggcggggtctgcgccctctgcatgcttgatgatcggcacgtctgcgcgctctgcccagacttcaagctgctcaatggccgccgcgcggaacgtatccgccgcgcccaaaattaccgatttgccctcttttttaaggcgggaagccagcttgccgatggtcgtcgttttgccgacgccgttcacgccgatgacaaggatgacggatggctgcgtatcgagatgcaactcgttgtcgccgctgaccatctccgtgacgacctcctgcaaaagcgtcataatctcgttcgggtctgtgatgccgcgctctttcacgcgtgcgcggagcgtatcgcagatttcggtcgcggtgttcatgccgacgtccgccatgacaagcagctcttcaagctcctcaaacagctcctcatcgatctttgtgaacgcgtggagcatgctgctaatctgcccggtgatgctgtctcttgttttttttagtcccgctttgatcttatcaaaaaagcccattcaggcacctcttttccgaatttatgttgttatacccagtttttcctgcgcttcgtgtgcgtgcagtgccaagagtttcgaaatgccctggtcctgcatcgtcacgccgtagagcatatcagcttcttccatcgtgccgcggcggtgcgtgatgacgatgaactgtgtcttttggttcatgcggcgcaggtaatttgcaaagcgcacgacatttacgtcatccagtgcagcttcgatctcgtcgagcatacagaacgacggtggatttacgcgcatgattgcaaagtaaagcgaaattgccacaagcgccttttcgccgccggaaagcagctcgatgtgcgagacgatcttgcccggcgggtgcacgcggatatcgatgccggaatgcagtacatcgccgctgtccgtaaagcaaagctctgccgatccgccgccgaataactcctgaaaaatccggctgaaattctgattgatgacggaaaagcgctctgcaaactgcgtctgcatctgctttgtcaagttgtcgatgagctttaacagctcggcgcgggagcgctgcacgtcgtccgtttgcattttgaggaaattgtagcgctccgaaacctctttgtattccacaacagccgccacgttgacggagccgagcgctttgatgctgtttttaagttcggacaaccgcctttgcgccgtgggcacatcttcaatcgtgatgttcatttcctcggcttcgcggcgggtgagctcgtattcttcccacagctttttgaggatagcgtcgtattcaccgctctggttttcacggcgttcgcgcagacgggcaagttcaaggccaatcgtctcgcggcgcgaggaagcttcgcgttctttttggcgcaactcgctcgtctgttgctcgagtgccgtgcgctttgcggcgatgacgctgaccgtttgccgtttttcctttgcggtctcacgcagattagcagattcgatttttcggttttcaatatccgcttcgcgcgctttgatcttctcgaagctttccgcaagttcttgatttaaactttctatacgtgcagcgcgttcggactgctgtgctttcagcgtttgcacagcattttcaagcgattctttatctttttcgatggcgagccccgcaaaacggatttcctgcaaatgctgcaaggtctcatcacaacgatgcattgcgtcctcgcggtcgccgatcatggattccattttgcttctggctgcctgaattttgtcttctgtttcttctgttttctgctgggcgctgtctgcggtctgcacaaaaccgctcagacgctttgcggcactttctttttcgtcgcgcagagaagcaaggttcgcggtttccgtctccacgtcgcgtgcggcacgggccgcttccgttttgaagcggatctcatcttccctgtgctgcgccagcacagccttggcgttttcaagctccaccatggcctgcagcacttcctgctgtgtagtcttgtggcgctccagtgtttcatttgcagcctgcgccagcatttgtgcgtctgcgcgaatgcgtgcaatctccgccgagcggctcaaaaggccggagtttcgcgccgcggaaccgccggtgaacgaaccgcccgcattgacaatctgcccgtccaagctgacgacacggtagcggaaccgaatacgccgtgcaatctccgccgcgcggtcaaggtcttctgcaacaatagtgcggccgagcagagaatcgcggatgccggcgtactgctcatcacagtggcagagtgttgaagccacgcccacaaagccgggcatattctgcacatcgcgcgcatcgataaccgtaccgcgcaccgtggtcagcggcaggaatgtcgcacggccggaatcgcgctgtttcaataagcgaatcgccgctttcgccgcatcttcggaatcaacgacgacgttctgcatggcggcgccgagcgcggtctccagcgctacggcgtattcgcgcgggacttttaaaagccgtgtaacaggtccgtggataccacgcagattgccgcgcgtgctctcgcgcatgacggttttaacgctctgcgtgaagccttcaagattgcgttcaaggtcttccaacagtccagcgcggcgctctttttctttggcgtcgagcatctggcggtcggcttcggctttcacggcttcggcgcgttttctgcgctgttgcacacgcatttcatgcccctgcacagtgttttcagcgttttgaatgtactcctccgtatcgtgcagcatggcgtcaagctcctcgcactccgtgtgaagcgctgcaaggcgttcttcgctttcggtgatcgcagcatccactgtttcagcgcgggcgcgaatctcctgcatggaggattccgccgaggactgctgcacgcgcatttcggaaagtgcggcgttcagtgccacaagctcagccgaaacagcgtcgatctcacgcgtggtgctgtccgtgccggcacgcagctcctcgagttgtgcggtaaaggcaacgaaatcggcatggttctgcgcagcttccgcttcctttgcttttaccgcctgttctttttcttgaatatccgcttcaagcgtttgtccggtcagcgcggcgctttcaatctcgccatttaatctgcggatggtctgctgctcgtgcagaatatcattttcaagcaccgaaacttctccctctttacgggtggcgagttcatcggcttcggaagccttcaaacgtgcttcttccatccgtgcggtgcagccgttcgtttctgtgaaattctgctcgatttgcgcggaaagcacattgagttcactttcggcttcctcgtagctgttctgcgcggaggcaatcttttcctccacctcgcgcacgatcttgccggagcgctccagcgtttcaagccacaaaccgatctccagttcctttttctcgctgtcgagtgaaataaacttttcggctttctccgcctgctcgcgtaaagggcccacgcgttcttcgagtccgtttaaaatatcgtgcaggcgaatgaggttttcttcggctttttccaagcggcgttcggcttcctctttgcggtagcgaaagcgcgaaatgccggcagcttcttcaaaaatctcgcggcggtcttcgctttttgcggagacgatgctatcgatcttgccctgcccgatgatggaatagccgtcgcggccaaggccggtatccatgaacagctcatgcacatcgcgcagacgtacgagcgttttgttaatgcggtattcactttcgccagagcggtaaaaacgacgcgtaacggaaacggtgtcgccgtcgtaattcaactcgcggtcggtgttatccatggtgacggtcacttcgcaaaagccctgcgctttgcgctgcggcgtgccgctgaaaatgatgtcctccattttggagcagcgcagtgcgcgggtagactgctcgccgagtacccaacgcatggcatcgctgatgttgctcttgccgctgccgtttggaccgacgaccgccgtgatgccgttttcaaattttaaagtcgttttatcgggaaaggttttgaagccctgcagctccagagattttaaaagcatctgtttacctgcctatcgtagcctgtatgtgccgccggaaagcgaagcatccgggcggatgtgcacggtgtagccgtgcttagagaaatgctgcaaattttcttttttctgtccgagcgcaatggaaagcatgcgcgggtcaacatcaatcgtaacttccgaatcgtttcgggcttgaagcgctttaaggacgttttctcggaagatcgcgctgcggcacagctccataaaagcggggtgaaacggtcccgcgacgcggttttccagttcttcgctggcgtgcagtcccacacggatgagctttacaccgcgctgctcaatcatcgggatgagctttgcacagagtgaaacggcattctctaaggtctgcggtgtgtattttcctgcgcggtacaaatcgcacagtggtgtgttttctaagacgattgtagggtaaatgcgcatggtgttcggctttagagctaacagcctttcgacagtcttcatcgcctttgcgtcactgtcgccgggcagcccggtcatcatctgcaagccgagctcaaagccgtatgcgcgaattaaccgcgcagcgttttccacatcctttgcggtatgcccccgacgattgagcagcaacacttcgccatccatcgactgcgcaccgagctcgattgccgttacgccgtattgcttcaatacgatcagacgttcatcatcaatggcatccggccgcgtagagcagcggataccggcaaagccgtatgtttcgcatgctgcgtgcgctgtttttaaaagcgccaaacggtaatcggggtcgattgccgtgaagctgccgccgaaaaatgcgatctcggcgttctgcacgcgctcccccatttgctttgctgcgttttgcagcagcagcgccacttcttcaggctgcggctgatgattttcacctgtaatgcggttctgattacagaagctgcattgctgcgggcagccgttgtgcggaataaaaattgagatattcgcgtgcttaatagcccatcagctccagtgcttcgcgtgccgcctgctgttcggcttccttcttgctgcgtccgccgcccttgccgatgacattgctgttgaggtgcacctctacggtgaagtgcttgtcatggtcggggccatgctcgccggtaagaacgtattcgagccgttcaccggggttctgctgaatgatctcctgcagcatcgtcttgtggtctttaaacgggcgttcgcccgcagactgcgccgccggttcaatgtagtgcagtacaaagcgcttggcttcctccaagctgccggaatcgagatagattgccgccgtaatggattcgaacacgtccgctaagatgcttgggcgttctctgcctccgctgtgctgctcgccgtggctgagacgcagcagctcgcctgcgccgaagctgcgtgtaaacccgcaaagcgatttttcgcatacgagcgccgcacgcttctttgtcagcttgccttcgggaatatccgggaacgctttgcacaggtattccgccgtgacaaaccccaaaatggaatcgccgaggaattccagtcgctcatagctctggtcgccgccgcggctctcgtttgcgtaggaggagtgcgtcagcgctgtgatgagcaggttgcggttcttaaatttatatccgatctttttttcaaattcatccaatgatctcatagttatacctttgctgtcttgttattcgttcgtgttttccgttttctcgttttgtagagctgcggtgatctcacttataatgccggactcggtgtactttaccgtaagcgcaatggcgtttttcagcgtggaagccttggcgctgccatgtaccttaaagaccggcttcgagcacccgaggatcggcgcaccgccgtattcgttataatcaagctcttttttcatggctttcatgtcgtttaaaaccattgccgccgcaagcttattttttaggctctttttgaaaacggccttgaatttattcatcagcgccatggcgacgccttcatacatcttaagaagaatattgcccgtaaaaccgtcgcacaccacaacatctgccgcatcaaacggaatgtctctggcttcaatgttaccgatgaaatggacgtctttgttttcactcagcagtgcaaacgccgcatgctgcagttcgccgcccttgtgcggctccgtgccgacatttgcaaggccgatgcgcggcttttgaacacccatgaccttctgcatatacacagagcccatcatgccgaactgctccagcatttcggggcggcattcgttgtttgcgccgccgtctgccagcatgaaaaagctctcggatttcggcatgagcggtgcaaatgccacgcgcttgacgcctttgatgcgcttgacgagcaatgtggcgccaacgacgagtgcgccgctgttgccggcggacgcaaacgcgtcgcccttgccctctgccaaagcgcgcaggccgaccgccatagagctttgctttttggcgcgcgtgatcgctgtgggctcatcctccatcgtgatgacatccgggcagtcaatgatctcaaaatcggaaacgttaacgttcagcttttccgccgctgctctgatcttcttttcgtcgccggttaaaacgatctgcacatggagctcatctgccgccagacggcagccttttataatttcgtccggggcgttgtcgccgccgaatgcgtcgattatgatccgcatgtttttccctcactttaatattcagcttccggcaaaagccggttttgttcgggcatttcggtttatcaaacacggattttccgccgataaaccgctttagactataattcactctattatagcaaaaaaacaacgcaatttcaataccgcgctccccataagttgcacaaaacaaaaaacgtgcgccaggctttcccggtacacgtctttttctgatttggaggaaaaattttgagttttgatttctagaatttatccggcaggcggatctcgcggcgcacggctgtgccgttgatctcgttaaaccgcacggcttcattctttacggccattgcggcggcgatgcccgcggcctcacccatggagcggcaggtgggttggatgcgtgcggcggactgcgcacggaaatccatacccgcgcagcgcccggctgtaagcacgttatcgagcgttttcgggatcatcacccggaacgggacttcccaatactgttcatcgaccggtacgtcatgctgatatttgagtcccagcgaaacatcgtccacgccgtgcacatcgataggataatggctcgcagcaatgccgtccgggaattttctgtacgtcagcacatcttcaatcgtcagcatgtattctgcttcgatgcggcgggattcacgaaagccgacgagctgcgcgatgcttgtgatatacgcattctcaaagcccggaatatagtcgcgtaggaatttgcgcaggcgcataatggcttttttgccctcaagctgcttttgcgtcataaattccgcatccacaacgttttctttcgtcgtcagctccgggcagttgaagttcatgccgtccgggcggccgggaataccgaatgcctgaaaatagcacgcgtcctgctcggtcagcacgccgttttcatacgccttgcggataatgtctttcataccgggcgtgttcatagcaaagtatttatattggtcgttgccgaggctgcgcatgtacgcgtggaaacgttcaaagtcaatacccgccatgtcaaagcgcagggagaccggctgattcacgcggttgtggttgccggactgatacgacgcaccgacgagcttgatgaggtcagcgtcaccggtgcagtcaatgaagcacttcgctttgtatgccgcaaggccgttcttattgttgacaatcacgtgtgttattgtgcgatcttcgagcacggcatccacgagcgtggtgtaatacagaatatcgcagttactgtctgccgccatgtcttctaacgtgatttgcaccataacggggtcaaaagagttggcgtcttcctctgtcccgccgacggtgcgcaggcgctctacaagctctgcactcagcgggcagtggccatcataatttttgatgtgcagtaacatcagcggcagcacaagaccggtggtagctgagccgccgagcgcgccaaactgctcgatgatgagcgtacggctgccgcggcgagctgcagcgatgcccgcaaaagcgcctgccgtgccgccgccgagcacgacggtgtcaaaggtatcgatgaccggtattttcttttcgggaatatgcagtgtgttcatatacattcctttctttatggagaggatcccgccctccgccgtgcgggcagaaggcgggatcgctttcttcatatcacatttttaaggagaggctgtaaaattattcggagtaggacttatttgcgtcgtagaattcctgcatagcagcttcgacttcaaggccaccgtttgcgtcccagtcggcctgcatcgctgcaatggcggtatccgggtcggtgccctcaacgatcgctttcaggaaggaatcgccgaatgcctgattcagcgccgtgacatactcctgaaccttcggggaggtcttgccgtaaagctcgatggagatgagcggctcgtactcgtctacgcgagcgttcatcgcttcataagcttctgccatttccggagtctttctcgctctggcctgccacattttgaaagaaacggtcgggttgttgatgccggagagcttatcggaattcgtatacgcattgaagttcgttgcatcgtcgccggtgaagattggggtgtagttgccgtcaatcacttcgtaggaaacgccttcttcgccgatgtaggttctgcgatagttatccggttcggagaggatgttgagccagttgatggcatgctcggggttcttggagctctgcgagatgcaggaaacgaagtttgcgcccttcatgatgtagtgtgtgggcttggaattcgcatctgccgcaaggtccgtcacgaactcaatcttgcaatccgggttattcgttgccagtgcgttgaccatagccggaatgtcccagaacatcagcggtgcgcaggcaacagcgttggcgcttgcaaatttttctttggcgttatctgctgtgttgatcggcatatcgttatccatgagaccttctttatagagcttctgcatgtactcaagatacgcggtgatctgcgggtgcttgattctgtgtgtgtaggtgccgtcgatgtcgtaccattccgcctcgcccatgccgaagccggagagcaggacctgaatgaatgtgctggacttgttggaggtcagcggtgcgaagccgtacttctcttttgcagcctcaaggaacgcggtgaagtcatcgatgttcgtcggcaactccatgccgagctcttccagcatatcgctgcgcacgccgatgccgccggtgagcataccgtacggctcttccttggaagccagcatgttttcatgcggaataccgtttacaacgccctgatcgttcgtaacggactgccatgcaagctcactgatggcattcgtgatgttggatccgtacttgtccagcatgccggaaaggtcgatcaatgcgttctgcttagagagctgtgcgtactggcttggagaaactctgagcaggatgtcgtagtctgcgccgctggagatctcaagcagaagcttctggtcggcgttatccgccggcagagcataccacttggtcttgtagcccgtgagttcttcgtcgattttccatgtcggctgctcctcatagttataagcctgatacatgctgaggatcttcagctccggcttttcgcctgtgaggatcgggtcgtcctcggtggcttcggattcgctggaaaccgtgctgctttcggtgctgctgtccgaggaagcggtgcttgaagacgatgaggatgtggtcgtgccgccgctgcaagctgcgagagagagaatcatagcagctgcgagcagtgcgctcaatactttcttcatgttgtaactcctttgctgaatgaattttattcatgcaatagtcccctattgcttgataacggatttaatgttagcccttaacggaaccgattgtgatgccctttacgaaatacttctgtaagaacgggtatacgcagagaatcggaatggtggaaacgacgatggtcgcggcgcggatattctcgccggaaacgttcatcgcctggttcacgtcgccgaagttgccggaggaatcctgcaagcttgttgcctgcgtgacaaggtcgaacatgtactgctgcagaggctttaagtttgcgtccgtgatgtacataacgccggcaaaatagttgctccagtaagcaacggcgtagtacagcgtaacggtggcaagcaccggtgtggacatgggcagtaccacactgaagaaaatgcgcatattcgatgcaccgtcaatgcgggcggcctcttcaatgacttccggcagcgtttcaaaatagtttttgatgaggaacagattaaacgatgagaacatgccggagaaaatgagtgcgaaaatggtgttcgtcaggtgcagcgtgcggaacaagatgtagtttggcaccatgcctgcgctgaacagcataataaaaacgaaaatgtacaggaagaacttgcggccgataagatgcggcttcgagagtgggtaggccgccataacggtaagcagcattgcgccgatggtgccggtaatcgtgaccgtcacggtgacaaggaacgatgtgccgaactccggcgtggttaagacgtactttatggtaccggtctggagcccaagcggccaaaagagcaccttgcccgcaatgacgttgccttcgctgctgaatgcttttgccgcaaggtttaagattggcatcagcatgataagaccgacaaggatcatagcgatgaggttgacaacatcaaacacagagattttgtttttctttttagttgtttttgccatggcgttaccaaatcccctttcctgttgcttttctggcaataaagtttgaagagtgaacgaggatcatggaaatcacggagttgaagaggcccacggcggtgccggtgctgaactctaacttgccgagacccatacggtaaacgtatgtgccgataatgtccgccacatcgtatacggtcgggttgtagaacacgaagatctgatcaaagccggcgttcatgatgttgccgacgcggatgatgagcatcaaaacgatggtcggcagcaggctcggcagcgtaatgtaccagatcttctgtatgcgcgtcgcgccgtccacgtccgccgcttcaaaacactcctgatcaaggcctgcaatggcagcgaagtaaatgatggagctccagccgatctccttccacgcgtccgcaatgacgaggatgccgcggaacttaccgctatccatcagaaagctgaccggctcgaacccaagtgatgtgataacagagttgatgacgcctgtagaaccgaggaacgaaacgaaaatgccgtagatgacgacccaggaaaggaagtgcggcaaataaacgatgagctgcaagcccttttggaatttcgtgctgcgcacttcgtttaagaacacggcgaagataatcggcagcgggaacgtgaagataatcttatacaggctgatgatgagtgtattcgcaaaagcctgctggaactcagactttttgaacacctgctcaaaatacttgaagccggcccacgggctttccaaaatggaacggaacggatcacccggtacctgaaacatgttgtagtctttgaatgcgatgagaatgccaaccatcggcagcagatgaaagatgaaaacgtaaatgagcgccggaagcagcagcagatatagatcgaagttttgctgcaaatacttgcgtgccccacccttccttttcatttttgcgtatccgtcctttcctccccgaaggccccaaattcttttccttcggttgatgaacccattttacagcaaaatgcaacaaaaaggaatgaattttcttcctgttttttgtcattatttaccgcgtgtttatttctgtttcgtgcaaaatcgcacaggaaaaaggagtccctttcgatacatttggaacggaatattttgaattatatcaaaaatcgtagttgtgtgctaatttatcgttgatttccgtgacttcttctaaaaaatcctactatttatgccgcaattctggaaatttgccgtaaattctgttataatgatgacaatgtagcaagccatacgcacaaaggtttttattttgtgcttgttttcgacattggggaaatgccccggtcgattctttggggaggatttggaatgtataaaatgatcgttgtggacgattccgagatgacgcgccagggcatacgcgcttccgtaaactgggaagtgatggacgtgcgcatcgtgggtgaagcggcagacgggttggaggccatggtgctcatccacgatacggacccggatatcatcatttgtgacatccgtatgccgaagcttgacggcattgcactcatcaatgaggtgctgccctctcacccatctctgcaggtcattttcttcagcggctattccgataaagaatacctcaaaaacgccatcaagctcgaagccgtggattacctctataagccgttgcaactgcacgagctcatcggcgccgtggaaaaagccaaaaagaagtgtatgaataagaaagtgcatctgccgcagaacgaagccgatcttgcgctttcccttttgcagtgcagcgaaaacgagatcccgtctgatctgccgctggatctgcatgcgccgctcgtgactgtcattgtgcagatgaatacggcgggcgagcacatagcagaccgcgcgtacgacaatcagctcgacgatctgcttttggtttctcgccactacttggcgttccaaacggtcgcggcgcgcatgttcgatggtaaatttgtgatgtcctgcgcgggtaagggctacattctgcacgcgaatgtttcgcaggactttttaaaccgcaaaacggcggaggtgaagctcagcccgttcttcaccacgctcgacagcggtcaggccgatgtggtcgtcggcgtgagcaatttgtgcacggatttcaaatatctgcgcgaagcatatgacgaagcccgcgcagcggtgcgcgccgcgttcctgctcggctacgggcgcgtaatcttttacagagatttgagccaaaagccgtttgtgccctcgcaggatatgcagcgcgagctgtacgaccgcattttggcaaacgatttcacgcaagctacaaatttccttaacagctatattgattcactttccgcctgccgcgagcaggatattccgcagattcgcgaggcgctcgcgtccattgcatattggctcagccgtcagggcaagcagaacgagcaggacggcagccagtatatttcggagttcattcactttgcgccgagcctttccgtcgtgcacgattatctgctcgcacagctgcaaaagcacatcgacagcatctcgaacctcgataacaaaagtcgcatcgtgctcgaagtggagcagtatatcacgcaaaattacgataaggaactctccattcgtgagatcgctcagcgcgttttcgtaacgccgaactacctttgctacctttataaaaagaacaccaagcgcacactgaaccagtttattctggataccaaaatgaaaaaagcccggaagtttgtgtgcgagacgaatatgaagttcggcgagatcgccgatgcgctcggctacgcgaaccagaactacttcacgcgtttgttcacgaagtatttcggcgaaagcccgcgtgcgtaccgcaacaaatacggcagcatctccttttccggcacggagggcgaatgatgatgaaccctttctcctaccttgcgctgcggtataaaaactgttctatacacgtaaagctctttgcgtcgtactttcttctcatttttattcccatcattgcccacacaatgttcgccacctaccagagcacaaagatcatcgaaaagcaatcgatggaaatcacagggctttacttacagcagacggaaaatgagcttgaatctgagcttaaccgccttgcgaccatatcctcctccgtggcgcagctttcggatgtgcatgaggtgttggaaaagcaagatagcaacatcagcttcagcgaagaatacgatgacataaatgcgttgtacaaaacaattgaatccacacgcacgctgtacggcgtatatcaaatccggctttatatcagcgattcgtttcggtatagccgcagtcactacattacgtatccgttaagcgaaatttccgatgcggattggtataaacggcttttggccgaacacggcatgcgggcgtttttgccgccgagcacatttcgtcagccgctgtcgaagccgcaggaggttctgtccgttgtcacgctcattcgcagtcgcaaggatatcaacacggtcctcggtgcggtgcgcgtggatattttgaaaagcgatgtattaaacatgctgcgccatggcaactacaccgaaccgagcgcggcctatcttgtagacgaaaacctcaatatcatttgcggtgcggacagctctctgacgctttccgatgaagagcttgcggctgatattcatgagcttcaaaaagaaacgggttcattttccggtgtgcagacgcagggcgaatcggtgttcggtctttccgcgcccgttttcgacggctgccgcatattcacggtcgcttccatgaataacctgctttctcccgtcaaagatctacgcaatcaaatgattgtgctgaccatcatcatcagcgtaatcgcgttcattctctcctatgtctacgcaaaatacagcacgcggcgtatcaaaacgcttgcaaagcaggtgcagcgtgtagaaaacggcgatttaaatgtaagttgtatcgtggacagcgatgatgagatcggcgagctgcaaaacagcttcaatttcatggtgcggcgcatcagcgtactgattgacgagcggtataacctcggcaaaaacctgaaggacatggagctgcgcgccctgcaggcccagatcaacccgcattttctctataatacactcgatctaatctcttggaaagcgaccgcaaacggcgatatggagacggtggacatcgttgtgaagcttgcgcgtttttaccgcctcagtctcagcaacggcagcgatttcctgccgctcagtgacgaggcggagcacgtgcgactgtttgtggagctgacgaacctgagccgcggccgcacggtggagctcatcacgaaaatcgatccgtctattgcagattaccccatcatgaagctcattttgcagccgatcgtggaaaacagcctgtttcacggcttatatgagctcgatgaccgcgcaggtgtcatctgcctttccgccgagcgcatcggcagctatgtgcagatccgcatacaggataacggcatcggtatggataaaggcaagctgacagagatccttgccaaaaaggataagcccgtcgtaaacactaagcgcggcggctacggcatcggcaatattttggagcgcctgcacatttattacgatgatgattttatgtttgagatcgattccgccattctggtcggcaccacggtgacgatccgcgtcccctattcccgcaacgattccccgcagatccacgcggagcgccccatcggcggcgcagagcaaaattgatgctttatatcgatttttactaaaatactacgcactgcatattcacctcttgtttttttcgcttgtcttcgttatctttaaagcagcgcagcgtttatctgcctgatctaaagatgaaaagaggttcaacatgtatacccttagatcccgttccattccgctcaataccgattacgacgtgatcgtggttggcggcggcccctcgggctgcacggcggcggccgcagcggcgcgcaccggcgcaaaaacgcttttactggaagcaaccggctcgctcggcggcatgggcacttccggattagtccccgcatggtgtccgttttcggataaagagagaatcatttaccgcggtcttgccgagaccgttttcgagcgctcgaaggcactttctccgcacgtggcaccgaccgacgttgactgggtgccgattgacccggaggggctgaaacgcatctatgacgacctgatgcaggaatacggcgttacggtgctgttcaacacatttctctgcgacgtggatgccgaaaacggcgaagtgcacgccattgtaacggcgaacaaagccgggttcacggcatacagcgccaaaacgtatatcgactgcaccggtgacggcgaccttgccgtatgggcgggtgcaaggtacgagtttgaagaagacggcgagccgatgccctccaccttgtgttttattttgtccaatgtagacttgtatgcctacttatatcacccgaaatacgggcacagaaatggcggcatacacccaaacaacaaaaaaagctttacacacctgctgccgaacgacgaccgtttcccggaaatcttagacacgcacctgtgcaacaacatcatcggcccgaatacggtcggcttcaacgccgggcacttgttcggacttgattctaccgacccgaaatcagtctctgaagtgatgatgcgcggcagacgcattgcaaaacagtaccgcgatgccctcgcaacttatttcccggaggccttcggcaacgcgtaccttgttgccactgcgcccgtgatgggcgtgcgcgaaagccgacgcatcgccggcgattacaagctgaccgtggaggattacgttacgaaagccgattttccggacgagatctgccgcaacagctattatctcgacgtgcactatacgctcgaggaagcgaagcttgcagccgtcggcaagatcgacggtgaaaagcgtgatgcccgctacggcccgggcgagtcgcacggcattccctaccgcgctttgctgccgcagggcgtgaaaaacgtgatcgtctccgggcgttccatttcgtgtgataagcgcattcagggctctgtgcgtgtgatgcccgtgtgcctcacaatgggcgaagccgcaggtgtgacagccgcgtttgctgcaaatgcaaacggcgacgtacatgcggtcgatacagataaattgagagaaacactgcgcgaaaacggcgcgtattttcactaaaacacaacggaggagtttaacatgaaatatgatgtgatcgtagtcggcggcggttttgccggtaccgcagcagcggtctccgctgcaagggaaggcgcaaaggtgctgcttttggagaaaagcggatttctcggcggtgcagccggaaattgctacgtcaacccctttatgggctacacaacgaaaatcgacggcaaaacgacgctgctttccgacggtatttttaccgagattctggatcgcctcgagaaaaagggcggactgatgacgaaccgcgtgacgttcagcgaagaagttttaaagctcgtcttcgatgaaatgaccgaagagagcggcgtagatgtgctgttccacgcctacctgctgcgtgccgagcgcgactgtgaccgcattatgtccgtgacaatcctgggcaagggcggcgaagtgacctttgaggccgactatttcatcgatgccacgggcgacgccgatctgacggcatgtgccggtgcaccgtaccgcattggccgcgaggaagacaatctttgtcagccgatgacgctgtgcttccgcatgtccggcgtagacgttgacctcgcgttcaaaaacacggagaagatcaacgcgctttacagaaaattccgtgaggacggcaaaatcaaaaacccgcgcgaagacgtgctgaaattcaaatatgtcgcagacggcgtactgcacctcaactctacgcgcattgtgaagcgatcgccgttcgatctttatgacttaagctttgccgagcgcgaagcccgccgccaaatgttcgagctttacacgttcctcaaagaaaactgcgaggggtttgaaaacagcacgctgctgtcctccgccccggagatcggcgtgcgcgaaagccgtatgatcgacggtgtgtacacgctgacggtcacggatctcaaggattgcgtacattttgaagacggtattgcggcgtgtaactatgatattgacattcacaacccggagggcaccggcacgagccattattacttcaaagagggcacgtattacaccattccctatcgaagcctgatgccgaagaacatcaaaaacctgcttgcagccggccgctgcatttccggcagtcacgaggcacaggcatcattccgtattatgcccacgtgttgcagcacgggtgaagccaccggtgttgcggctgccgttgccgcgcaggaacacaccgatttcccggaaacggacgtgaagaaaattcaagcattgctgcgtaagcacaacgcgtttatcggcgagtaaaatctgaaaatacagcgaaaaaccctcgacagctgaaatgtgcttcagcttgtcgggggttttctatcgttcgtcccttatgcgtttttcagtgtttcggcaaggtcttcgagcgcgcgagcggaaagcgcggcgtagcgctcttttttgtcacgaatgtgcggctcaatgacgggcagaatgccgaagttcgcacccatcggctggaaatctttcgagggactgtgcgcggcgtgctctgcaagtgagcccatcatggtagtgatgggcaaaatgagcggcgctttgccctctaaacggcgcacggcgttgcgtcccgcaagcaagccggacgacgccgattccatatagccctccacgccggtcatctgccccgcaaagaacagctccgggcgcgtgcgcatggagaaatccgcgttcaaaagcttcggcgaatcgaggaacgtgttgcggtgcatcacgccgtagcgcatgtactcggcgtttttcaggccgggaatcataccgaacacgcgcttttgctcgggaaatttcaagtttgtctggaatcctacaagattgaacagcgttttttctgcgttttcggtgcgcagctgcaccacggcccacgggcggtgacccgtgcgggggtcgcgtaagccgaccggcttcaacgggccgaagcgaatcgtatcgtgtccgcgctgtgccatgacttcaatgggcatgcagccctcgtagaccttcgggttcatcacgtcaaaatcgtgaatgggcgcgcgctccgcggtgataagcgcttcataaaacgcatcgtactcctctttgttcatcgggcagttgatgtaatcgtcgtcgcccttatcgtagcgggaggccgtgaagcagtgctccatatcaaggctttcacgcgtgacgatcggtgcggcggcatcgaaaaagctgagcgcaccgccgcataagttcgtgatctgttcggcaagcgtgtcgctcgtcagcgggccgcttgcaataacggtcacgccctctgcgggaatttccgtcacttcgccgtgcatcacttcgatgttcggatgctccgtgatcgcttttgtgacgagctctgaaaagcggtcgcggtcaacggcgagcgcgccgcctgcgggcacggcggttttatccgcacaggcaacgagcagagaatccatgcggcgcatttcctctttcaaaagcccggcggcgctgtcgatgcgcgcagccttcaaagaattcgagcagatgagctccgcaaacccggcgcttttatgcgcgggcgaaaacttctgtggcttcatctcgaaaaggcgcacaggataccccgcctgcgcaatctgccacgccgcttcggagccggcaagacccgcgccgatgacggtgacggtctgcttattctccatctttctcccccgcgtcgtccttattgaacgtgtaagtgcagcccggcgttacgcagtagagcgtctgggctttgtcttttttctttaagagcaccttaccgcagaccgggcaggtcttgtcggacggcgcgtcccaagagacgaaatcgcacttcgggtagttgtcgcagccgtagaacacacggccgcgcttcgattttttctcgatgatcttgccgccgcacttcgggcactttgcacccgtatcgttgacgattttctgcacggtcttgcactccgggtagccggagcaggcgataaacttgccgtagcggccgaatttgacgaccatcggcttgccgcagttcgggcagacaaggtcggtcttgtcttcttcaagctgaatcttcacgccgtccatttcggtcttcgcctttttgagcgtcttctcaaagtcgtcatagaagtcgtgcagcgtgtgcacccagtcttcctgaccgctctgtacttcgtcaagctctttttcaacggcggcggtgaacttgatattcacaatgtccgggaaacgctctttcatcagctttgtaatgacttcgccgagctcggtgggcttaaaggacttaccttcgcgcgtgacgtattcgcggctcgtgatggttgtgatggtcgcagcatacgtggacgggcggccgatgccgttttcctccagcgtcttgatgagcgaggcttcagtaaagcgtgcgggcggctgtgtaaagtgctgcgtacccttgaggtcgcggactttcagggacatgcctgcttcaagcttcggcaggtctttgcccttttcttcttccacgtcgcggccctcttcgtagagcacagtgtagccgtcaaacgcgacgttgtagccgcttgctttaaaaatataatcgcctgcggtgatgaccgcctgcgtggtgttcaaaacacagttagccatctggcacgcgacaaagcgctcccaaatgagcttataaagcttgtactggtcttttgtaagggaagattccacgtccttcggtgtgagtgcgacagaggtggggcgaatggcctcgtgaccgtcctgtgcgttggcacgcgccttataatggcgtggcttagaaggcaaatactgcttgccccagcgctcgccgatgaactgcacagcctcctgcacggcgtcttcggaaatgcgcagagagtcggtacgcatataagtgatgagacccacggcacccatgccctcaatgtccacgccttcgtaaagctcctgcgcggctttcatcgtgcgcttcgcctgaaagcccagcttgcgcgaagcttcctgctgcaaggtggatgtgatgaacggcggtgcaggctgcttgttcttcttgccttttttgacggactccaccatgaacgcggcggattcgaggtcggcaaggattttatcggactgctctttgttcgtgattttaatctcgccgtttttatcgccgtagaacgatgcgccgaaaatgctgcgggaaccctcagcggtcaggcgtgcatcgatagaccagtattcttcgggcttaaacttgcggatctcttcctcgcggtccacgatgatgcgcagtgcaacagactgcacacggcctgcggaaagaccgcggcgaatcgtttttgcgaggaacgggctgagcgaatagcccacaaggcggtcgagaatgcggcgcgcctgctgggcgttcacaaggttctggtcgatggaacgcgggtgcgccatgccctccgtgatgccggttttcgtaatctcgttgaacgtgacacggttgtggtaatcctcgtcaaggccgaggatatacgcaaggtgccaggagattgcttcgccttcgcggtcggggtcggtcgcgagatacacggtatcggcctcttcggccgcttccttcagttcggaaacaagcttctcctttcccttgatgatggcatatttcggcttgaaatcgtttttcacgtccacgcacaggcgcgccttcggcagatcgcgcacatggcccatggaagcgatgacttcatagtcgccgcccagatatttcttgatcgttttcgccttggcaggcgactcaacgataacgagtttcgacatggttttctatctcctattctgtatctatttaaaccgcacagcgaatgtgcgagtggaagaatcatgtattaggtgcatttgaaaacaaagaaaatgcgaaacggacaagctttcgatttttcaaatacaccttagtatagcgtacttttacgcctttgtaaacctctggccgggataagttttaatgaggccgaaaagctcgagctccgtgagtgccgccaaaattttccccgtgggcatgcccagttcaagctccagctcggaagcgtgcttgggggtatcgttcagtacggcgtaaacggtttttgcatcttcagaaacgttttgcaaaaggttgttttcgggcgcagggatcggctcggcaggcttcttctctgctatttcgggctccttttctgcatcggaaagcgacgcaatcttcgggcgaacgcgggagacatgggagatattttccgctgtgcgggcaagctgttctatacgctcctgtctgcggcgggaagcaaacggctttaaaacatcctctgcagtgtaaatgcgcgctgcaccgtcctcttccagtgcgatacagccggaaaacgctttctcgtcttcgccaatgaatacgaaaacctcgcgattctgctctaaagcatactttgcggtgatgagtgcaccgctcttttttggcgcttccgcaatgagcacgccgtgcgccatgccggagatcagccggttgcgcacctgaaacgcgccgcgctgcacaggcgtgtgcatgggatattccgtgacaagtgcaccgccgaaatcgacgatctcgcggcgcaaaatggcgttgtccataagatacggatattcgagcccgcacggcaaaattgcgattgtcttgccgcggccgttcagtgcacccttgtgtgcctcggaatcaatgccgagcgcgccgccgctgataacaacggcgtttttgagcgcaagcccgtaggcgatctctcttgcggcattgagcccgttttgactggctttccgcgtgcccacaatgctgatagaaacggcatcggaaaggatgctcaaatcaccttgcacatataaaacggcgggcggattgtagatttctttcagcaatacagggtagtcttcgtcatcgggcgtgatgaccttttgaccgagcttcaaataatactcgagcgctgcggcggcctgttccgcgccgtaggcattgagcgcggcaagctctttatccgaaacgaacgaaaaggagctccacagtcgtgtgccgccctgatacagcttttcggcactgcctatgcggcgcacgagttgcacaggcttcggactgcctgcgccaaacgcgttttgcagccagatccagtatacgcggttatccatagcttgtgcctcctgccccgttgcgctccatttcccacagcacaatggcggctgcggtggaggcgttgaacgattccgctctgccgcgcatggggatcgtcacgcggtcatgacaatgctcgatggcttcatttgtgagaccgttgccctcgttgccgatccacaccgcccagtttcccgtttcaaacggaatggtcgtgatgggcgtagcgtcgctgtccggcacggcggcaagtgacgtgatattctcggcatgtaacactttcaggcaatcctctgccgtctcaaagcggcggatgccgaggcggaacaccgcgcccatgctgccgcgcagcactttcggagcgtatacgtcgcagcaggtacccacaagcgccaaatgccgcacaccgagcgcttccgctgtgcgcagcacgttacccatgttggacgggtcctgaatattttccataacaagcacatgacggcacgggcgtgtatccgactctgcggaaacaggcaggccgtccgcacggcgcttcggcatgcgacacacgcagaaaatgccttgcgggttctttgtatcggacagcatgggcgcgatgtgctcctctatgcagtatgcgtgctctgtctgctttaaaaccggatctaaataatctttgtattttttagcggcgttttccgtaaagaagcacgcggcaatctccgtttggctccttgcggcatcggcgcaaaggcgtgcaccctcggccatgaaaaggcctgcttcacttctgttttccgctttctgcaaaagtgcggcggcatttttaacgacgctgcttttacggctggtgattttttcgattggcacggtacacactcctttttaccgataataagcagaaatcctgtgcactgtattttacggcacacgggaaatttccgcaaaggcgattttgcacaaagaaatacacttacgtttgcaactatcaccctaaaaaatgtgcgcccggaagaattccggacgcacggatagcttaattatacagaagcctttgccttctcgacaagtgccttgaaagctgcttcgtccgcgatggcgatctcggaaagcatctttctgttgagcgtgatgccagccttcttaagaccgttcataaatgcggaataggtggtgccgttagcacggcaagccgcgttgattctggagatccacagacggcggaaatctctcttcttctgctttctgccgatgtaagcatagttgccggacttcatgacagcctgcttagccatcttaaagtgtctgctcttggaaccccaatagcccttagcaagcttcagaaccttttttcttctcttgcgcgtagcgagcgcacccttaactctagccatttataaaaacctccgattatgctttacttaaacttgagctgccctgttcgcttatgcgtaggggagcatcttcttaacagcctttacgctggtcttatccgtaacggtcgtgccgcgtgcatggcgcttggacttagcagtcttgccatggccgttcagaaggtggctcatgtaagcgtggccacggataactttacccttcttggaaatcttcaggcgcttcttagcaccgctgtgtgttttgagcttcggcattttatagtcctccttgaaattgttacttaacgggcttgggggcaaggaacatcagcatgttgcgcccttcgagcttcgcgggcttatcgacgtttgccgtgtcagcgagcgattctgcgaaacgcttcatgatgtctgcacccagttccggatgacccatctctctgccgcggaaacggatggaaaccttgaccttgtttccgtcgttgaggaaacggatcgcatgatttcttttcgtctcgaagtcgtgggtatcaatgttgagagacaaacggatctctttgatttcaactacgcgctggttctttttcgcttctttttcacgctttgcctgttcgaaacggtatttaccgtaatcgatgattttgcatacgggcggcgtggcctgcggggcaatctttacgaggtcaagatttttctcagccgcaaggtttaaagcgtcacgggccgacataatgccgagctgtgcgccgtctgcgccgatcacacggatctctttatcgcggatctcttcgtttatctgcagttcctgtttgctaatggttaagcacctccatcacgcgtgcgataacttgttttcgcgaagccggcaataaaacagcgggcagagaacctctgcccgcaaatcaactcaatcaaacacacgaatttatcgtgattcttctcgatattgacctgtgtcagacggtactgcacgggtgtgagccatagctccgctttgttttccaaatattatattaccacaaagagcgcaatctgtcaataggtaaacggggcctaaaaataattttattcttttcccggtgcataaacaggggcgttcatataaaaagagtaaagcacggtgtctttcacttctttattcatgacgcgggtcatcgcttctttgtagagcgtgagctgcgggccgtatcgttcccacaattcctgtttattgtagcaccgatcggtcttaaagtcaagaatataaagcgaaccgttttcttcaaacatgcagtccactgcgccctgcaggatcatcggctgcgcggcatcttccccgctgagtgttttatccgtgagtcctgcgggaatggaaacgatgaactgctgctctttataaacgcggtcggcatgtaaaacgcgctgtccgagcgggccggtaaagaacttttccacacgggtaagatcgacggcgtttgcctgcgcttcggtgagatagctttgctcgataaggcgtttgagctccgcttcggggtcttttgaagcggcggaaaaatccgcaaactgcatgaagttgtgcagcgccgtgccgcgctctgcgggcgtcagtcccttggcgctcaaaaacgccgggcgtgaaagtgtggcttccgtttcggcttgttctgccgcaagcgcggaggccgcgaccttcgttgcaagctttgtctgtgcggcgtagggatacacgaacgaaatatccctttcgatgcgcgtcttgagcgcttcatcgaccggtgcgggcgcttcggctttcggcaggtcggataaaatctgcggttcactgtacacgacgcgaatatcccacggcgtgtagtgtgtgcgcaaaatgatgtcgtcatccgcttcgatgcggcggcgcaggtcatttccgttcgggtgccgcagcgcacagagcatcagccactccgaaatgccggaagcgttgctgacagtgtacggcggcacggtctcctcctcggtgatctgtgccgcaagcttttgcaggtttgtatcgatatttttcacggtggaaagcagaatgagcttctctttggcacgggtcatcgcgacgtagaacacgcgcagctcctctgcggaagcgctttccgccgttgcaaggccgatggcctcgcggatgaacgcggtgcggcgcacgccggtctcggggtctgtaaggcgcatgccgacaccgagctgtgggtgcatgcgcaggtcgtccgtatcattcacgaatttccggccgcaacccgcgatgatgcacacgggaaactccaagcccttcgatttgtgaatgctcatgatgcgcacgacgttggcgttttccgagacgacattggcgctttccatatcggatcgattctttttcaggcgctccgcaaagcgcacgaagccggaaacgccgctgtacccgtaggcttcgtattctgccgcgtatttttccagcaggcgaatgtttgcaaggcggctttctccgccgggcatggcgcgcacgatgttctcgtaaccggtttcggtgcacagcatattgataaagctgtccgcaggcatggtggaagcgagcgctcggaaacgcgtcagctcatcgcgcacacgtacacagcgctcgttttcggcgcgcagaagcgaaacgtacaacgtctctcccccgcactcgcggcgcagttgcgccatatcttccgctgtgaagccgtaaatggggctcatcaaaacggagagcagcggaatgtcttgatccgggttatcgatgacgtttaaaaatgccaagatgagcgagacctccgccgcggcgaaaaagccgcccgtgacagccgcccacgtgggaatgcccgcattgcgcagattttctgcatagacaggtgcatatttattggagctgcgcagcaaaatgcagaaatcgcgatattctatgggacgctcctgaccgttttccgtgacggtgaagccgctttccatcagctcgcagatgatttttgcgatacgctgcggctccagcacctctgcgcccacgccgtcgatgtcttccaaaaactccacgcgcgtttcgcaatccgatttttcggggtactgcgcgcccgctgcaagcttttcatcgccgacataatcgatgccgccgcatgtgcgggacataagctgcgtaaaaacgaagttgacgctttccgtcacggttttgcgcgaacggaagttgcggtctaacacgatagatgccggatatgcgtccttttcgcggtcatagcgcggaaatttatctttataacggatgaaaatatccggcattgcctgacggaagctgtaaatactctgctttacgtcgcccaccataaagcggttcgcgctgttttgggaaatggattcaaaaagataatcctgcacgtcattcgtgtcctgatattcgtccgtcatgatttcgtcgaagcgctcggaaacgagctttgcagtctctgtgcgccgaaatgtaccgtcttcctgctccgttaaaaacagctgcaaggccatgtgctcaagatcactgaaatcgagcacgtttttctcacgctttttcgcgctgtatgttttctcgaacgactgcacggccagaaacagatagacgaccgtgccggtcgtggcggcgatttcttccgtgaatttctggtcttccgcgtcgcctgcaagcttttgcagtttgccgatttccttttttaccatatcgcgcatggccttgatgcgatcggcacgcgggtcttctcctctgaaagaaccgagcttatcgaacgtgacggtcaagtcggaaaagcggcaggtttcagggtcttccattgcctgcagctttgccgaaagcttatcgatatccgcgccgagtgccgtgcagtacgctttttcaaggtccgggtcttctgccgcaaggcggtatgcactgtgggaaagcttgattgcgaagtcatagacctccatgatatgctgccggacgacctcgccccacggtgttttgaccggggactgcgtgacatctgtcatggctttttgaatgtcccgcatccatttgtccggaaacggatggctgcgcgtgtattcgtacattttgaggatcgcggcggaaaggcgggcatcgtttttgtcgccgccgagcacatccgccaggtctgtcctaaagttttcgtctttgtaccactcggtcagtacttcgtcgagcgattcggtcatcagctcttcctgctgcttatcggtgatgatggagaaatcgggcgagataccgagcaggtagaaaaattcgcgcacaatgtccgaacagaagctgtccaccgtgcagatgtgcgcctgctgcaataaaagctgttggcggcgcaagcgggtgttttccggctgctccttcatgagtgccaaaagtcgcttttcaatgcggtcacgcatttcggctgcggcggcttttgtgaaggtcacgacgagcagacggtcggcgcccgtaggatgctccggatccgtcaggcgctcgataacgcgctccacgagcaccgcggtcttgccggaacccgcagcggcggagaccagaaccgtaccgcgccgcgctttgatggcgtcgagctgtgcgtcagtccaattcggcattttccccactccctttctctaagtcattttccatgcgcgcgagcgcttcatcgtttttcatactgttcttttcggcattgtccgcagcgtgctcggagccgcagacggacgtatacgggcaccacgcgcaggcgttgatgttctgcatcagcggttttgccatgatctcaccggcagaaagctcctccgccattgttgcgatgagacgttccacgtagcgcaggacgatctgcagctccggctcatttaaagcggaagccgtaccgctgagttttcttgttttggtgagataaacaggaataaatcgaccgttcagacccatttccattgcattcaaaatttcgttgtcctttaaaagcaggccgttcatgcgcaggtttttttccacttcctgctttagcttttcgacgctttccgtgccgtccgaggtcacacttgcaatgaacgccggcatgtacaaaatgcccgccgggtgcaggtctttattctgcgcgagcgccgcgaggtaaataagcatttgcaagctcatgccgtacagaacatcggcaagcttaaactctttgcggccggttttataatcgacgacgcgtacataggtcgtaccgttttcgtctttatacaaatccacacggtcgatgatgccgccgaccgtgacgagcccgtttttcgttgggatacgcagcggtgggtacggtgtgccgtttttgagctccagctcgaaatgctccgggcggaacaggctgtgcatcatttcttccgacatgtgggcgatgagctttacggccgtttgctccatgcggtacaagcggtatttttcgcgcggtgaaagagcatcatagccgcccatattttcgcgcacatagtccatgatgctcgtgtgtacgcgcgcttttaagtcgtctgcataaaggtgcagcgcttgaatgtcttccgcactgccgagaatctgctcgaaaagatagtgcatcagactgccgtattccagcgcatcgatctctgccgggcggcgctcctttgcgccgaggccgtagcggcagaagtatttaaagcggcactggtggtaaacttcgatttggcttgcggaaaaataatgcccgccgccaaagtaatcgtttgcggtctccggcgcaaggcgagccgaagccatgcggtctgtgccgccgaggacctgcaaacgtccggcgaactccggcttttcgcgaaaaatactttttaatgtctcggagacggtcgagttttcgttgaaaagcgacgccgtttgcgaaaacgcggcttccggtgcgtttgcgaaaaactccggcggcaggttttgcgtaatttttaaattcggcagcgccagctcaactgcgctgatgagctcaccgggcgattttgcctcctgccctacactgacgggatacgtgagatacagcttctccgaagcgccgcacagcgcggcgtaggcgaggtacttttcctgtaacatgcggtcttcgagcacatcggaaacgggcagctcgagtgcaaggagcgtgcggcgctccggctcgctgaacacaccgtttacggacggaatgagcgggaactcgccttgcacggcaccgaggaggaacacggcacgcggcgcggactgacggatgcggtctgcggtgccgaatgtgatgctgtccatactctgcgggatgtccgaaacatcctcgccgctgacgatttcctttaagagccttccgtatttttcacccgtgatgatctgttcaccgagcacgcctgccatttggtcgagtacttccatgagcaaatcccaaatgcgcatttgagcggcggaaaggtcatcgcgcccggcgttttcgagcgtgcggcaaaatatcgggaagctttgctccaaatcaaaatcgatgagaagcttataaacggcttcggagatctgctcgccggaagcgtgtgcggtgcgctcggagaattttataagcggtgcggtgacgcgctcgcgcaaagcattcagcgtgcgcagtgtctcggccgtggtgtcatccatcggcttaccaaagccgtccgggtgttttgtgaaagggctgcaccaagcggatgcgccgtttaatttccatgtatatatgtagttttcaagctgcgcgagctcttctgccgtaaagcttgtaatgcccgttttcagcatggcgagcacatcttccgaacgccatttgcggctgcccgaaacgatttgaaacgcggagagcacgaagcgcatcagcggctcggcatcaaccgtgcgcgcttcggaaagaaatgccggaatttcccagcggcgcagcgcggcggcaaacagccgcgtgtagcgttcgccgtcacggcagatgacggaaatatcgcggtagcggtagctctcgtgcaaaacaaggttgcggattttagccgcggtgaagtccgcttcctcatacggagaggtcgcgcggaacacacacacgttctcagcggtatctgcttgctgtacgtggccggcgtaggtgctttccacggcgcgaagctcatcgttttgaaagcgatacggcgttctacagtacacaggcgaaagcacgcccgtaccgctctcctttgcaaggcgcatcaggcgcgaagcggtgcggcgcacggtggaaaacaggtctttgcggctcgtgtcgagatcattacagcatagcgaaacactgactttttccgcatggcgcagggcgtggcgcaaaacgcgatactcctgcacggtgaagccgtcaaacgcatcgacggcgacataagcatttcggaaaaaatccggatggtcggccagcaggtcatcaaggcgcgtcaggtcgtcgagcggatcgagatacgtctgcgcgacgagtgcttcatatgtaccgtaaatgagcgcgatctcttttagtttgcgcgaaaggctgtcttctgtgacggcttcggcggcttttgtgagcatatcgggctcaatgccgcagattttcatttcaccgacggtgttcaataaaacgtccgtcatgcgatcggcgcttttttcaaacagcgtgagttggtcggcgcagttttcaagcgccaaggtcatcaaaatacgcctgccgccgtccgttaaacgcttgcctgcaccgccgccgtactgcaaaaatgccgcctgcgcaaggcgcgtaaagctgtacacctgcacacggttcgcggtttcagcaccgtattccataagcagcgcgcgttcggattcaaacgtatattgttccgggacgatcaagatcgttttcggcgcagtgctttccgcgaggcgtttacgcagcagcgtcgttttgcccgtaccggcgcggccgaggatcaactccagcattcttcttccccctttttccgtttagagcttatactgctcttattttagcacatgtgcgctcacgcgtcaaagagttcgcggagacgtgagaaaatttccgccaccttgaatttgacttcgtagctttccggttcacgcacgagtgtatcggtatcatcaggcaggttggataggtcgcttgcaccgggcatgcacagcgccggaaatacgacgcaccaccagtttttaccctcggccttgccgagcgaaatgcgcagtgtgcggtagcgcccggcgggcagcttgaagttctcgtaggtgcgggtcggaaagtacatttcgcaaatttccgctttggcgcagtacgggaggttttcggctttcaagacagaatttgctgccgcttcaaggctttcaaggtgcgtgcagagcgctgtgacggcagtgtcaaaatcttctgcatcgccgtaccactgctcggcttcccgcagcacggcatcacgcacgcggagctttacggcttgatccgcttcgtcgttcgagtttgcaataacatgcagccgcacgatgttctcttccagcgcggcacactgggcggagaagcccgctaaatttagaagcactgttaagatcagcccgcacgccatcgcgcgcagaagaagcgttctgctatacagtgttttgattttacgcatcatagatttattctccctgcacatttgcgtcgttacacaaaatttcattcaattttttgtataaaatatgggcagagaatttgcggtttatacttttcgcaaagcaaaatttccgctatactatataataaactatgagcatcaaaacgggaggaatttttatgaactggacagtaccgaacaccgaaagccttttacgccgcctaacgaaaccgaatggtaagattgacgtggttttggacaccgatacgtataacgagttagatgaccaatttgcgctttcgtatatgataaaaaacagcgacaagctgaatgtaaaagcgctgtatgccgcgccgtttttgaatgataaatccgtatcgccaaaggacggcatggaaaaaagctatgacgaaattctaaagctgttgacgcttttaaaacgcgaggatttaaagtccgtcacgtttaagggctcggaaacatatctcacggacgaggacacgcctgtgctttcgcctgcggcgaaggacctcgcaaagcgcgcgatggattatacacctgaaaagccgctgtatgtcgtcgcgatcggcgctatcacgaatgtggcttccgccttgcttttgaagccggaaattcgcgaccgcatcgtccttgtatggctcggcggcaatgcgctgcactggccggacaaccgcgagttcaacatgtatcaggatgttgcggcggggcgcattgttttcggatgcggtgcggcgcttgtacagttgccgtgtgcaggcgtagtctccggcttctccgtgagcgagccggagttcaaagactactttctcggcaaaaacgagctgtgcgattatttggcacattatgccattgaagaagggcggcgctgtgcgcaggcggaaacgtggtcgcgcgtgatctgggacgtgacggcggtggcgtggcttttggacggcgagttcatggacgacacgcttctgcacagccctattccccagtatgacgacacatggacgccctcgaacacgcggcattttatgcgctatgtgtacaatatccaccgcgatgttttactcaaagaccttgtgcaaaaattgacgaaaaagtaaatttttcgtgcaatttcggcttttacgtgctatacttaattttgtagtaaacagaatacgcaccttttcctttattttgatccgaaaggttggttgtctcatgaaaaagctgatccttgtgacctcaccgcccgcgtgcggcaaaacccggctttccaaacgcctgtgtacggcgctggatcatgttgtttatttggacaaggacacgctgatcccgctttccaagcaaattttcaaagtggcgggcgaaccgtatgaccgcagctctgcgttttttgaagcgaacatccgcgactacgagtacgagacgatcttggaccttgcgtttgaggcgctgcgttatgcggacaccgtgctcatcaacgcgccgttcacacgggaaattcgcgacacggcgtacattcaaaatttgcgcgcgaagctcggtgaatatggcgcaaagctgtgcgttatttggatcgtaaccgaccccgctgtgtgcaaggcgcgcatgatgaggcgctcttccgaccgcgacacgtggaaaatggaacactgggacgagtacataaagggcgtgaattttgatattcccgaaaatctgcgtataccggacgacccagaaagtcttttactgtactacaactcgaccgacgaccttgcggacgcttcatttgcccgcattttaccaatgctgaaccaaaactgattttaggagcctactcatgcagaaaaccgataccctgtataccgcatacgttgaagttttaaaagaagaattgctgcccgccatgggctgcacagagccgattgccattgcctatgcggcggcagcggcgcggcgcattttaaacgagctgccgtgtgaagtctgcgtcacggcgagcggcaatatcatcaaaaacgtgaaaagcgtttttgtgccgaacaccggtggtctgcgcggcatccctgcggctgctgcggcggggatcatagcaggacatgacgagcttttattggaggttatctcaaaggcgaccgaagcagagcaggcggagatcaaggcttatatggagcacacgccgatcaccgtgaagctttcggactctccctatattttcgacattgacattacggtaaaaagtgagcgtcacacggcaaacgtgcgcattgtggggcaccacacgaatattgtgcatatggaaaaagacggcgaaatattgctcgacacctgtgccgatactccggcggaaagcacggacagcggcatttgcgaccgcagttcgttttcggtgaagacgattcttgagtttgttgagtgtgcagagctttgcgatattgaaacgcccgtaaaacgacagattgactacaacacacgcattgcgaaagaaggtttatcgggcagttggggcgcgaacatcggcaaggtattgctcgaaacctacggcgatgatgtgaaaatccgcgccagagccatggcggctgcgggcagcgacgcgcgtatgaacggctgctccctgccggtcgtcatcgtttccggcagcggcaatcagggaatgacggcttctctgcccgttgtggagtatgcaaaagaattgaacgtcggctatgaaaaaatgattcgcgcggtggcgctctccgacctcgtgacgatccacctgaagtccggcatcggacggctttccgcatactgcggcgctgtgagcgcaggctgcggctgcggcgcgggcattgcgtatttatacggcggcgggctaaaagaaatcgatcacacaatcgtcaactccattgctattgattccgggatggtatgcgacggcgcaaaagcctcgtgcgcggcgaaaattgcatctgctgtggatgccggcattttgggctaccacatgtacaaaaacgggcagcagttccgcgcgggtgatggccttgtcacgaagggcgttgaggagacgatacgcaacatcggcatactggctcgcgaaggtatgcgcgagaccgaccgcgagattttgcatatcatgtgcgattaaatgtgataaacaaagagacgtttctctgtagttttacagggaaacgtctctgttcattttacataaagcgctccggcagacgaaaacagtccgccggggcgcttggtatgttatagactttgcttcaatatttcttctgcgcagcgcaggccgtctacggcggcgctggtgatgccgccggcgtaacctgcgccctctccgcacggaaacaggccgcgcaccgtggggcactcgcgcgtctcgtttcggaggatgcgcacgggtgaagagcttcgggtctcgggagcggtcaataaagcgtccgggtcgtcaaagcccctcagccgcctgcccatgcggcggatgccctccgccatggaatcgcagatataatcgggcagcacgtcccttaaatcgccgggcacaactccgggccgataggtcggctgcacgctgccgttcagcgcagtcgttacgcggttttcaagcaggtcgccaacgcgctggcacggggcactgtatgctcccccgcccgcttcaaatgcggcgcgctcgattttacgctgaaacgcaatgccggcaagcggatgcgcggaaccgaaatcctccggcgtgatgccgacaagcagcgcggcattgctgttttgaccgtcgcgggcgtattcgctcatgccgtttgtcacgacactacccgtttcggatgccgcaccgacgacgtagccgcccgggcacatgcagaacgtgtacacgccgcggccgttttcaaggtgaacattgagtttgtagtccgccgcgccgagtgcggggtcgcctgcaaaatcgccgtactgtgcgcgatctatcgtctctgcgtggtgctcgatgcgcgcgccgacggaaaacggcttcggctccataggtacacagcttttttcaaacagcattttaaatgtatcgcgcgcactatggccgatagcgagaatgacgtgtgcggtctcgatcgtctcattcacaccgtttgtctcggcaacaaccccgcaaacagcattgtttttgacgagcaggtcggtcatctgcgtgttgaagcgcacttcgccgccgagagatttgatctcctcgcgaatggcgcggacggtttgcggcagcttgtccgtgccgacgtgcggctttgcgtcaaatggaatgtcttcgggtgcgccgtgctcgcagagcgtttgcaatacgaagaaaatgcgctcatctttcgtgcctgtattgagtttgccgtccgaaaacgtgcctgcgccgccctcaccgaactgcacgttgcagcttgggtttagttttcgcatctgccagaaggtgtttacggccgcttggcgttcttctacggagccgccgcgctctaagatgatcgggcgcaggccggcgcgtgcgagcaataagcctgcgaacatgcccgccgggccaaaacccacaacgaccggacgctgcgacaatgtaccgtgcggcggtattgcataggttcttttcggcgcttttgtgacgtggctgtcgcgcacgcgggaaagcagcttgtcttcgttgccgtccgtttccacatccacggtaacgacaaagcgcacgtcctgcttttttctggcatcgacagagcgcttgacaagtgccagttttttgagcgtctgcacatcggtacgcagttttttggcggctgcgcggcgcaaagcttcgtccgtatagtgaagcggcatggaaatgtcgctgatgcgtatcatcgtttttcctccttcaggcagcgataggctgcgctttttccggctgtgatgccgcttgcccacgcaaaatgcaggttgtagccgccgcaatcgccgtggatattcagcatctcgcctgcaaggtaaagccccggggcttttttagatgccatcgtgtgcgggtcgagctccgtaagcggcacgccgcccgccgtgacctgcgccgcagaaaaatctttcgtgccggtgatgtccaacctccagcctttaaggagagaagcaagctttttaagctgtagggctttgatttttaccgccggttcgctttgcacgatgcccgccgcgccgacaagcatgtagccgagacgcatattgagtaggccggagagcagatcgcccgctgcacgtgcgggatacaattttgtcatctcaaggagataatcgagcacgtcctgataggccatgtccgacaaaagatcgagctgtacggcaagtgaagtgcacttcttattgcggatcgtgccgagcgcaaagaactcgccgacatatatggaaaggccgaacacgcaaatgccggaaatgccggtatccgtaaactgcacctcgccgctttcttcatagacgggtttgccgtctgccaaaagcacggcgtttgcaggggcgcgcgtgccggagagcgttttccactgctttgcgcgcacggtaagctgcgttaaagacgggtacagctttgtcaccgtatggccgagctgctttgcgagcgtgtagccctcgccgcaggaatggcgcggagatgccgcaccgccgcacgtcaaaatgcactgctttgtgaaaagctgcgtgccgtccgtacagatgagcgtaaatccgtttttgactttctcgatttttgaaacggtgtgttcttccgaaaacgacacgccgtatttttcggcatcccatcgcaaagcggagagcacggccgccgcctgctgattctgcgggtataccctgccctcgctgtccggcttggtgacgagccccatttcgcggaacacggcacaaatagctttgggcgtgtattcatgcaataggtcttgaattgccgtaacatcgccgtggtaatgcgcgggcgaaacgtttaaattcgttaaattgcagcggccgttgccggtggcgagcagctttctgccaagctttgcgttgccctccaaaacaagaacagaaccgcgttttttcaaaacatgtgcggcggcacacgacgccataagccccgctgcaccgccgccgatgatgataatgtcttttgtttccatttaaacttccttattaaatgaacatgccgagcaggccgtaggagaagatcgccatcaaaatatccgcgatgagcgtgccgccgatgacggagaaaagcgcgtctttaatgggcattttcatcagcgctgcggcaagcgaacccgtccatgcgccggtgcccggcagcggaatggcgacgaagatgagcaggccgaacgtcttgtatttttcaatctgcgcaaacttgcttctgcccttggcttccatgcggtcaacaagctttacaaagcgcgtgttgcgcatccagtcgaaaatcttattgataaagagcagaatgaacggcgtcggcaaaatggtgccgatgaagcagatcagcatggcaggcaataaatctacgccgagcattttcgccgcaacaagaccgccgcgcagctcgatgatgggcatcatggagaggatgaacaccgtaagctcacccggaataatatttctgaaaaaattgacaagtgcttctaccatactgaattgttcctttcatgatccgttctttttcaagttccttaaaagttccgcaaataagtatactaaacgtcatggtttttatttttcttttaaagaattatagcttacgttttgctgacaaaacgtgctcaagatgttttctgtgcggcacaataggcttcaaggtcgccgaacgagtagcccatttcttcccattttgtaaggagctcatctaagatttcggcgttcgtgctcgacgtgctgtgcagtaaaacgaccgcgccggggtgaatgcgcggtaataatttagaaaatgcctgctcgggtgtgggctggtcatccgtataccaatcgacataggcaaggctccaaaacaccgtggaatacccgagctgctgcgccattttgaggttttcctcacagaatttgccctgcggtgggcggtagagcttcggcatttcgctgccgagaatgtccctgtacagcgcttcattcttttgcagctcggtctgaaagctttggatatcgccgatcttcgacatgtccgggtgcgaatacgtgtggttgccgatggtgtggccttcctctgccatacgttttacaagctccggctgcgtctcaaaataattgccgacgaggaagaatgttgcctttacgccgtgctttttgagcgcatccagaattctctccgtgttgccgttttcaaagccggcatcaaacgtgatgtagatctctttttggttcgcttcgccgacatacagcgcgtcgaaatttcttaaatactcctgcgaggcatttgcaacgggcggtgcgccctcgctttgaaagctcaaaccccaatcggtaatacctgcggcggcctctgccgcacccaaacggttgactgcgcgcaaagcgcaaaccataccgatacacaagagaatgattgccaaaacaacataaagcacctgctttttatcgaatatgtgcactttcattctgcgttccccctatttctttttataaagagtatgtgcagccgcataaaaaagaaccgggatagcattgcgaagcacatgaaaatcctgtacaatgataaaaagatgaattgtaagctgattgtaagaattctatccccgattttgtaagaggtattctgtatactttcagcatggagtgaaaaggagggcattttatgccggatatgaataagaaaaccattttggttgtggatgacgaccacgagatcgtgcgcgccattaccattacgctggagcgcgagggctaccatgtactgaacgcttacgacggcttgcaggcgctggattgcgtgacctcccgcgaagtgcatctgatcatcatcgacgtgatgatgccgaagctggacggactttccgccgtgatgaaaattcgcgaaaagaaaaatctgcccatcatcattctttccgcaaagggcgaagacagcgacaaaatccttggcctttccatgggcgcggacgattacatttcgaagccgttcaacccaatggagcttgtggcgcgggtgaaatcgcagctgcggcgctacaccgatctcggcgacatcaacacgcgcagcgacaacgtgatcgtgaacgggcgtttgacgttcaagctggacgagcacgtgctgtatgcggacggcgagcctgtaaaactgacggcgacggaaacgaaaatcgtggagcttttgatgaagcacccgggccgcatcttccccgccgaggaaatttacagccgcatctggaacgaacccgcgtactcggcggaaaacaccgtgatggtgcacatccgcagaattcgcgagaaaatcgagctgaacccaagcgagccggaatacttgaaagtggtatgggggatcggttatgaaattgaaaagcactaaccttgcccgcggtgttttcgcctggttctgctttttgctgtgcgcgttttctattattgtggggttgacttttgccgtgtactacccagatatatttgaagccataccatctgcggtagataaatgcggtcaggcactttcaggcgatctgcgtgaaacagatagctacaaggataatgtttccattctgtttgagcggctatattacagcacgcaaagcaatgctgcttcaaacacctcaaccgatgtaaccgcggaaaaggacaacgatgtaccctcaaacggctatcactactacatttcacgggatgaatccagcacggcactttcttgggtctatgtggaatcgatctcaaaggatgttcttttctcggtaacggactacagcacagaccccgccggcaaaacgatcacgaacgactcgaactgggatgcgcagacgctgccggagggcttcaattaccttttcacttgtgaaaacggtgtgacaaaaatttactacagcgacaaagacggcgatttaaactgtgttttcagcagtgatacgcctggcgcattttacacgctctcgctttcctacacgcttggcgcattaaagcaaagcaatgctccatcaccgaaaatcagctttgcggtgcgtgaaaagccgacctcttattctttatcgaatgagatcgtcagcgatgcgcagacttgggtcaacaatatacgctttgctataagtcttgttgccgctgcggtcgtgatgttcactttgatgctgctgctttccattttgttccggcaggacagaaagctgtttgagcgttacattgcacacggactcaagtggatttggatagaaatcaaagtcatagccgtatttgtatgggctttcgttgtgctcaatatcatttcgtatggatttgaccctgcaggcacagctgttaccctgttctccgtgttctttgtgttctatttgctcggcatcgatatttcccacaaccggcggatttatcggcacaacatcattcattccgttttgaagcttgtgcttggcaaccgcgaaggaaaaaaattcgagcagattgtttaccgcaaatacatggcgactgccggtattttggtggggctttgcatcgtaggagttttaggatatgtattcttttacagccattggttgatgggtacgatttggtttgtcgcgttttacgtcggtctgtttttcgcgagtgtgggtacgcttgtatggtttgcgtgggcactgcgcgacgacctgcgcgattacggcaagctgatggagcaggtggagcaaatgtacaagggcgaccttgacgcgatgaatcacctgcccgccacttccccgctttatgattccgctatgcagctcaatatgatccgtgacggcatccgtatcgcggtggaggaaggcatcaaatccgagcgcacgaaggtggagcttatcacgaatgtttcgcacgacatcaaaacgccgctcacgtccatcatcagctatatcgaactgatgaagaccgagccggatctgccgccgcacatgcaggattatttgaaaatcgtctcgcagaaagcagaccgtctgcgccatatgctgcaagatattttcgatgtctctaaagccgcaaccggcaatattacgctgatgccggaatacatcggtctcgataagcttttgcggcagacgctcggagatatggacggcgtgatgaacgacagtgagctgacgtggcgcgtgcagatcccgcaggaagacttccccgtttatgctgatgggcagcgcatgtaccgtgtgttccagaacctcattaagaacgcggcacaatatgcgcttgagggttcgcgtgtctacgtggagctgcaaaagcagggtcaaaacgccgtcgtgacgattcagaatatctcgaaatacgagcttaccatggacggcgattcgctgacggcccgctttgtgcgcggtgatgacagccgttccacttccggcagcggccttggcctttctattgcaaaaagcttcacggaggcctgtggcggtactttccacgtgaccgtaaagggcgaccttttcaccgtgatgatttccctgccgctcaaagagccgccgaaggagccggaaaaggaaccgctgcccgaaacggcagacgcagagaatatagcaagcgagccggaaaccaaccccgacgcgctccccgaagcttcggagcagacagaaaacaccgaattcccggagtcttcggaaccggaaaattgaaaaagttgagcatataaaaccgcccgcaggaaattgtagcctgcgggcggtcgttgttacattggaaaaacattaaggattttccgcaaaggcagagatgacggcggaatcgaccacggcgcgcatgaatgcgtccgtctcctccgagatttgtttcgtatcgccgaagaggtcaaacgaaacaatcttgccgtcgtacagcgtaccatagaggcgctcgtacacgggtccctcctccttgatattctccgcacagaggtcgatcataaagaacggaatctgtgtgtggtcgtaccacgtgatggtgccggtcgtgctgccgtccatggaagacggctccatgtatttcaaaaaatccttcttgcccttttcatccagattattgaggttaaaaacggagttcgcgtaatcggaagacttcgccgctacggctatggtatcgccgtttgccgcaataatctccgcagtggtcccgtttttctgcatttccttgatcttctcgctcgcatccaaaatgcctgccttgctccacgcggcatcgcccgccggggtatcgacggaaagcaccgtcgcgccctcggggattgtgacggtcatatttgtatctggaatcgtataaccattcggtactgtatgcggaagttcagaggtagcgtttttcccggtttcagacgaagtgctttcctgtttttcaggcgtgtttgaaattgaaggcgcacttgattcatcggatgtggtattcaccgtgatttgaatacagccactcatactaccgattaaaaccattaacagaattgcaatcccaaatattttaatgtttttcataggtatttacctcaatgttatagtcgttaaacgacagcagcgctgtgtaaatccgtttcacacagcgctgtctattttatttataccttactgcgccgctttctcaagtgcctgcttgatgtcatcgaggatgtcttccgggttttcgatgcctacggagaggcggataagatccggggagacgccggcttcctttaattgctcgtcggtcatctggcggtgcgtggtgctggccgggtgcagcacgcaggtgcgcaggtctgcgacgtgcgtgacgacggaggcaagctccaagctgtccataaagcgggtggccgcttccctgccgcccttgatgccgaaggaaatgacgccgcaggtgccgtgcggcatatatttcatagcgagctcgtggtacgggctgctctcaagacccggatagttgacccacgccacgcggtcgtcctgctcgaggaattcggcgatcttctgtgcgttcgagcaatggcgctccatgcgcagcgcgagcgtttccatgccgaggttgaggtaaaatgcgttcatcggggcggcctgcgcgccaatgtcacgcatcaggtggcagcgcgcttttgcgatatacgccgccttaccgaagtgctcggcatacacgatgccgtgataagattcatccggctctgtgaactccgggaacttgccgttgttccaatcgaaattaccgctgtctacaatggcgccgccgagctgcaccgcgtgaccgtcgaggtactttgtggtggagtgcgtaacgatgtctacgccgaactcgaacggacggcagttgatgggcgtcgggaacgtgttatcgacaatgcacggtacgccgtgcgcgtgtgcggcgtttgcaaacatttcgaggtccgtcacgacgagagacgggttcgtaagcgtttccgcaaacacgcagcgggtgttctcgcgaaatgcggcgttcagctcgtcctcggtgcagttcggcgaaacgaatgtgcagtcaatgcccatttcatgcagggttttatagaacaggttgaatgtgccgccgtatacggcgctggagcacacaacatgacctcctgcgtggcagatgttcagaacggccatcatggtggctgcctggccggaagatgtgacgagcgcgcctacgccgccctcgagtgccgcaagcttcttttccacagcgtcgagcgtcgggttgccgaggcgcgtatagaaaaagccgtccgcttttaaatcgaacagatcgcccatttctttggagctgtcataggtgtatgtggtgctttgtacgatgggcagaacgcgcggttcaccgtttccgggcgtatagcccgcgtggatacacgttgtatccggtctgtactgtttcatttggacttccccaatctttaataatatcctattttcgcggcagtgcttactttgtgaaaagcgcttttaaaagatttgcgatgaaatctgagccgagcacgaccaaaatgacgattgccatgaacgcgatgacagaaagcgactggatgagcatacgcttgccgcggggcatatcgttctcttcggacggtttttcctgcgactgctcttcccgctctttgagcatcagctctttggcgcgttcgaggtcttggtattccacgtaaatatccttatcggtcggcagatactccgggtcgtacacgctggtggaaaagccaccttttacggggtgtatcgcatggcgcaccgcgttttgctcaaagagcagcgcaagctccgcagcttccccctcgctgaccttgaggaaaaacacttcgtcctcgggctttacgggccgcagaccgcggctgcgcttgcagttcggacaggtttgtgtggaatcctcgcagatgcttttgcatttcgtgcagtagagcataatagcctcccatttcggcattgccgtttctgcttttcagtatagcacagcttttttacaaattcaactgcctttcgcggcgcacttcatcgcaaaatgtaggtttgtcaaacatattggacagcgaactcattaggcgagagccagcggaggggtctcatgggcaagttgttggcgcggcggttatggacggcaagctgcttggcaaagtcgtcgagtgaatagaacgaatggcaggaatagaagcgtttctgatcctcacggtggctgcgctccaccttgccgttgtggcgcggcgtgtagggccggatcagcttgtgacggatgcccagctcggcggcagttttctcgaacagtgtgggcagatcgcgcttgctgttggagaaacgattggtgaactcgaaaccgttgtccgtctggacacactccacttctatgcctctgcgggcgtaccacgcccgcagcttgcgcaggaagtccgccgaggaataggtggactgctccgggtaggccgccaggaaacgcagccttgtgaactcgtcgatggcggtgtactggaacaggcgcagctccggatctgcgatacagcggcgggggacgaccttgacatctacctgcacgcgctggccgggataggtcatctgctcgtaaggcttcggcttgtacggatttttgggcttttcggccggaaacagccccattttgcgcataacgcggaacaagctctccggacagcgggtgtagccgcgcttccgcagacggtgccacagttcgatcatgcccagcgacggattgcggcggcgcatatcgcggatgagctttagctcggcctccgtgtgctggttggggtggctgtgaggccgtctggactggcaggccagagacgccacactcccgtcccagcgctgcttccagaagtagatgtacgaccggctcttgttgtatttccggctggcgcggctgacgccgtacttttctgcgtacttcattagggattgtctgtaggccatgtcctgtgttatactcttactcatgaggaatatggtctcctttcggaaagtttggtgtggtagcttaactttaacacatgaggccctattcctcataccctttttattcaattgtccaagatgtattgtagtcctacactttcgcggcgcacttcatcgcaaaacaggctgcaactgttctccacgcacggcatttgcaagcgtttcgggaattaggtcgaaatgtgcgacgagagaattcggcttttttatggggtcgtcctgtccgaggggcacaaaatagatgtttttcgtgttcataagcagaccgatgtttttgcacgacgcaccgagagcatcgtttgtggcgagggacagtacaacgggcatggagacgcgcagggcggattttaccgccatcgtgacagctgtatccgttacggcatttgcaatcttcgcagcggtgtttcccgtgcacggcgcgacgagcacggcatcggcaagacgcttcgggccgatgggttccgcttctgcgatggtgtggataatttttcgtccgcagatgttttctatgcgctcgtgaaaactttccgccgtgccgaagcgtgtatcggtcgtgtacgccgtttcgctcatcacgggcaacatatcccagtcctttcgcagcagagcaagctgcgcgagagctttttcaaatgtgcagaacgatccgcacatggcaaaggcaagcgtgggcatgtcgatcactactcctccaaaatattgtagaccgcctctttgatatactccgccgccgtcttcggcgcgacgcggccgggcagcgagggcgcgtcgatgacatgcaggtgcaattcttccgcacgcttcaaatcggtgccgccgggtgcggaggcaagctcgatgatgagcgtatcgcgcgtttgctgcatgagcacaggcgaagtcaaaacctttgcgggcacagtgttgaaaatgagatcgaaccttctgctgatctcgcggtacgtcaacggctgcacgccgaacgcgcgcatttgcatgagatcggcctttttgcgcgctgcgcagaatacctctgcacccataccgcgcaggataatcgccagatttttcccgatgcgcccgaaccccgtgatgagacattttgcgccgtttatcgtgccggggtattcgcgaatcgcaatgccgactgcgccctctgccgttgggatcgcgttgccgacggcaagctcttcgcggcggtagtagtcttcgggctcaatctcacgccacagggaagacgaggcggtcaaccgctgaagcatgccgccgcacaccgttttgtgcataaaaagacgcgcaaaatcgtcatctaaacgaatttcgttttcggcatacggcgcgtttaaaaacagaccgtcctttgttgcgggcagcggcaaaaggatgacggagcttttcgccgcgagctgcggcaggtcgcattccgctgcgccgcggcaggtgccgagcttttctaaaccgcagacacacacggggtaaccgtccgccgcaatggactgcgccaaatatttcatgcgctcatcgccgccgatgacgccgaatgtattgatcatgggcatatttcccccacctttcaaattatcatccgcttcattttatggaaacgggcggcttttgtgcgccctgaaagacttttttatacttttttgaatttgctatttatttttctgcccgttggcggtataatgtatgtgtatgggtatgcaatttcggacgcatagctatgtttttgagatataacacagtgtattacataatttcagataatttcgcaaaacaagttttgcgtgaagccaattcagaaaggactctttcgttatgacgaatcagaataatacgaccgataaaaacgttaacctgctcgataccgtacgtcgtctgcactttgtaggcatcggcggttccggtatgtgccctatggcggagattttacaccacaaggattatatcatcaccggcagcgacatcaatgaatccgacacgctcgcacgtattcgcagctacggcatcccggtgcacatgggccaccgcgcggagaatatcggcgatgcggaggtcgtggtgtacacggcggctgcaaagcaggataacccggagctcgtcgcggcgcgtgcaaagggtattccgacgttggagcgttccgtgatgctcggccttttgacgaagaagtttgcaaaccccattgcggtttccggcacgcacggcaaaacgacgacgaccggcatgctcacgcagatcttgattgaagccggacgtgacccgagcgccgtcatcggcggcaagctgcctttcatcaacggcaacggcagagtcggcaaaagtgcggacattgtttgcgaagcgtgtgaatatgtcgatacgttcctgcagctccaccccgccatcagcatcatcacaaatattgatgccgatcatctcgactatttcggcacgctcgataatattgtgaagtcgtttcatcagttctgcttgcagacctcaaagcgcatcatcgtcaatgcagataacgccaacgccatgcgcgccgtagagggcattacgaatgcggagatcgtcacatttggcagaacggataaaagcgattactacgtgacggagctcaacgaagaagatacggtctgcgaagactttaccgttatgtataagggcgagcgcgtttgccgcgtgagcctgcgcgtgccgggtgagcacaacatgatgaacgctttggcggctgccgctgcggcacatggcatgggtgtggacggcgagcatatcaaaaaggcgcttgaggacttctccggcgtacaccgccgctttgagattttaggcaaatttgaaggcgtgaccgttgccgacgactttgcgcaccacccgacagagctttccgctgtgctttccgctgccgtgcgcatgggctaccatgaggtttgggcggtattccagccgcacacttattcccgcactgcaatgctgctggatgattttgcaaaggcgctttccatcccccagcatgttgtgatgacggaaattctcgccgtgcgcgagacgaacacgtataacattcacacaagcgaccttgcggcgaagattcccggcagctgctggtttggcagctttgaggagattgcggattatgtgatgacgcacgctaaggaaaacgacctcattttaacgcttggcggcggcgacatttacaagtgcgcaaatctcatcgtagaaaaatataaagagagagcataaatttctaaaaggctttccgcgcgaaagctttttcttttggaggtaccatgtcttttcgcgccattttctttgacattgacggcactttgctcgggcgggataaacgtatgccgccttcgacgctgcatgcactaaaaaaggcgcgtgaaaatggtgttctgctattcgttgcaacgggccgtgtgacgccaatgacgtatttcctgcgtgattattttgattttgacggctttgccgcgatgacggggcaatattgcttcgataaaaacggcaaggttttacatacgctggcgatcgacccggaagacattcgtcttttgatgcagctgcaaaaagaggagcctttcccctgcctgatcgccgaggggcgcgagtgctttgccgcaactccggcgaaacatattgaagatcactttttgcggcataatcttctctccccgcccgtttacgatatattgcgtgcagattgtcacgaagtgtatcagcttatggtatacgacccggaaatttatttgccgcgtattttgccgctgaagcatgtacgtatcacacatgctgtcggttattgctatgatattcttccgcaaaacggcggtaagcaaatcggtattccggcgatggcagcgcattacgggataagaaacgatgaaattctcgtgttcggcgacggcccgaacgacgtggacatgctgcgcgacgtcggcttcggcgttgcgatgggcaacggttgtgcaaaagccaaggcggctgcaaattatgtgacaacagatgtggacgacgacggcatttaccgcgccttgaaagagctcggcgttatttaaactataaacacagaaagccccgcaaaaccgattggttcggtaattgcggggcttttgctatgcggaaaattttatcgtttgtatttcggtgcggcggcgcggagcgtgtgccaaaggagcgcagcggcaatgatggcggcgcttacggcagcgccgatggaaaggcttttatagccgagcggccctgtgaccatggagacgagcacggcaacggcggcgatgcacagcaaaatgatatatgcggctttatccatatgctcaagtacatttttgttcatgttcataaaagcatctccttaatcggtaagctgattgacaacagcggcaaactccggcagcgtgagtgcttcggcgcgggaatttgcccgaaccccggcttgctcgaaggcgtctgtcacttgctgcttcgacatatgcagtgtgttggaaatggaattgacggccgttttgcggcgctgtgcgaacgcagcgcgaataacgcggaagaaaagtgcttcatcgtgcacatccacaggcggttcttttcgaatacgcaactgaatgacagcggaatccacattcggtgcgggcataaagctgccgcggctgacctcgaacaaaatttccggctcggcgtaatactgcacggccgcactgacagcgccgcactcgcgcgtgccgggctgtgcacacaaacgctctgccgcttctttttgtaccataaccgtgatgctcgtgatgggcaaacgatcttccaaaagcttcatgatgaccggcgatgtgatgtaatacggcaggttcgcacacacagcgacctcttccccgttaaattcttcttcgatgacgcggtgcaagtcaatcttcatcacgtcgtcgttgatgaccttcacgttatcgcagtcggcaagtgtttcgtctaaaacgggcaacaggcgcttatcaagctcgatggtgacgactttttttgagacctgcgaaagctcgtaggtcaaaacgccgatgccggggccgacctcaatggcgcctgcgcagtctgccgcgccgctcatctcagccatgcgcgggcagacggaaggattgatgagaaagttctgaccgagcgctttggaaaagctgaagccgttcttttccatgacggctcgaatggtggatatatcggaaagtctttgcatagggatatcctttcgattaaaatgtcactttatagatctgcacgccgttttcgtcaaagacacacgggaacagcgctttgatctccgcttcattcacggtgaagttattgcgctcgtaagcggagaccagaatgtaatcaatgctgtatttttcaaagagcgcacagtttgcctgcggtgcggagaacatactttgcatgtccgtttcgcgctcggtgtaatcgagcccgtgaaaatacacgtagcttgtggagccgcagacgatgtttctgcccgtcagcgccgcgatctcgttgttatggcgcatatcggtgagcacagtgtcttccggctcgctgttctcataaatgtactccgctgctttgagctgactgtcgccgtataagcaatagcccgcaatgctctctctgccgatggtcagcaccgcagaaagcatgcatagcacgagcgcgccgacagccaatgcgcggcggcccggcagtgtgcgcaggcggcggtaaatctcgaccatatacgaagcgactacgccgcagacgagaaaatacgcggcgtaaagcagcttgttgttatcataggtattcggctggaacacgacaaactcgcaaatgaaccaaatgacggctgcgggagcgcagaccgtgaaccggcgctgatctgccgtgaaaaatgcaggcaggaacaacagtgccgtgacgccgagattcacaagatagaaccacaaatagccgtcctgcaaattgccccagttgtaccacccacgcatgaagctgtcaccgctcgcctgcgagaatgtccacgtgaaaagctgcggtgcggcaagcaacagtgtgatgagcaggaatacgccccacgtttttacaagctgtataccgaaacccttgcggatcgccatggtgagcagtgcgagcacaaacaaaacaaacgctgcagcacaaaccaaaaccagatacagaaacacggatgattcgcgcgagatgagcttcggcgtgacgaactgcgcgccgaacgcgagcaacatcaaaacgagtgcagcgacttttgcggtaaactgcacatgagcactgctgccccgaaacactctgcggcacagtgcaaagcaaagccacacgccgcaaatgagtccgaacgcgaggaacgaatgcgtatgaatcatgacgagtccgcctgcaaaaataccggcaatgatgaaataccgctcgcagtgctcataaacggcgcggtacagcacgtataaaagcgggaataaaaccgcccagccgaacagcgttgcgcgctgcgggatgagcatatccacaatgacgttcacccagcggatattttggttgacaagattcgtgggtgtctcataaaacgatgtgaaaatgcgggtaaaattatctgttccgttttgcagattcgggaagaaatacgcaaagccgaagccgccgtttagaaaaaacaaaatctccgctaacgcggtcttcgctttatcacgcagccagcgttgccagaaaagatgtgcgccgaaaaacacctgcgccccggcaaaaagcatcggcagcacatacgcaaagcgcagcggcgcaccgagcaaatataggcttgaagaaatgctgtccgacaagaacggatacgaaagcttcacgcccggcaaaatggaatacatgggtggaaatgtcttctgttccgcgatactcgtgatgaacccgaggtgcatactcatgtcgccgtaggtgcattggctcgaccagatctcgccgttttggtaacggaagctgtgcagcaccaaaaacacgaacagcagccacaagccgagcggcaaaagcagtgtgcgttctgcacggtagaaggctttgcgtttgccgggaaaatcattcggaagcagcttcggacgctttaagaacacagcgccaaccgtcagcataagcagtgagatgagcgccaaaacatgcgctgtgatgctgaacgaaaacaggaatgcccacaacgacggcagccacattaagagcacgctgcccgcggcactgccgagaatcatttgtgtatatcgccgctctttatttaaaaagcatgcggcaagtgttacgccgcacagctgaaacatcagaaaatacagcagcgccaccgcgccgcccaaaaaattgccgcccataaacagctcctgaatttgttctttaatataatatattgtaccattttggcgacgggatgtaaagacggcagaaaaggttttattgcaggcgcttacgcgctttttcacaaaacacccggaaacggggttgcagttcaaaatgcaatgtgctacaatatattttaataattatggcgtctcccctgcggttttgcgcaaaagcgaacgatgatacgcagtcgtatatgtgtagtttccgattgcggagtgcctgaatgcaaagtgaggtgttcttcgtggagaatgatatccatcggagagataaaacgaactactatctggatctggctgagaccgtttcccagcgctgcacatgccttcgacgtcactacggcgctgtgatcgtaaaaaatgatgaagtgatctccaccggctatgtcggtgcgccgcgtggcagaaaaaactgcacggatatcggcaaatgcgtgcgcgtggaaagaaatattccccgcggtgaacgctatgagctgtgccgtagcgtacatgcggaagcaaacgccatcatcagcgccccgcgcgataagatgatcgacgccacgctgtatcttgtcggcaaggaggtctctaccggcgactatgtgaaaaacgccgtatgttgctccatgtgcaagcgcatggtcatcaacgcaggcattgcacgggtcatcgtgcgcgatgaccacgatcggttcagagagatagatgttcaggattggatcataaacgacgaatccatcgaaggtgtattcggctattgagccttaccccgttaccgcgtatccggcataaggctcggaaagaatacggtgaacatttatgtctttaatacaggtgtcaaacctgaccttcggctatgaaggcagctttgataacgtctttgaaaacgcgtctttttccatagatacaaactggcggtgcggctttatcgggcgcaacggcagaggcaaaacgacgtttttaaatctgctgctcggaaaatacgcgtacagcggcaccatttccgcttcggtcaactttgagtatttcccgtttgaggtggaaaatccggacgatacgccgcttgagattgcggagagcatcgtgccggactttgagatgtggcggctaacgcgtgagctcaacttactcgacgccgacccgggactgctttaccgcccctactcgacgctaagctacggcgagcgtacgaaggtactgctgtcgattttatttatccgcgaaaacagctttctgctcatcgacgagccgacgaaccacctcgatatcgaagcgcgcggcacactggctcagtatttgaagtcgaaaaaagggttcatccttgtcagccacgaccgtgcgtttctggacgaagtcatcgaccatgtgctttccatcaaccgcgcggacatcacggtgatgcgcggcaactttacgacgtggcaacaggagaaagaccgcgaggatcaatttgagttacaacaaaatgagaaactcaaaaaggatgtgaagcggctggaggcggctgcccgccgcagcgcggaatggtcaaaccgtgcggaagaccgcaagatcggtttcaaaccggagcgcacggaaaaggcccttgaccgtcgtgcctacgagggtgaaaaaagccgtaagatgatgaagcgtgcaaagagcattgaatcccgccgcaacgatgcgctggaggaaaaaagcgcgctgctgaaaaacattgaatcggccgatacgaaattgcagattgcgacgctgcgccacccgaaagaccttttggtagaggcaaacgacctttctattgattacggtgacggccccatctttcctccgctgcgctttgagatccgccgcggcgaccgtgcggcattgcagggcaaaaacggctgcggtaaatcgagcatcataaagctattgtgcggtgaagatgttccccatgccggcacgctgaaaaccgcaagcgggcttgtggtctcgtatatcccgcaaagcgcggagggactttccggcacactgcgcgactatgcagagcattgcggcattgacgaaagcctttttaaatcgatcttgcgcaagctggaatttcagcgcacacagtttgaaaagcgcatggaggatttttccgagggacaaaagaaaaaagtgctcattgcgcggagcctctgcgaaaaggcacatttgcttgtgtgggacgaaccgctgaacttcatcgatgttatttcccgcatgcagcttgaaacgctcttaaaagagtgtgtgcccacagtcattttcgtggagcacgaccgccgctttgtggaaaatacggcaacaaagatcattcggttataattgcggtttaaaacctgaacaaagcgcgtcgtgcagggctgcggcgcgcttttgttataaaaatcaggggctatgaaagagagaaatctatgaagcaaagaagcgactacattggcatattaaacggcatacgcgcgtattccattttgatcgttgccgggtttcattcgtggcagcaatcctggctgcaaaatctgtttccaagcaatttgctgcagtttatgggcgtgcggaatttcagcttaaactgggtgccgcgcacgggctacatgtttgtagacgtgatgctgctgatttcgggattctgcctctttttgccctatgcgcggcaaatgaccgacccgcttgcgccggagccggataacctgcgcacattctttaaaaagcgtgcggcgcgcattttgccatcgtattatttgtgcttgcttctctacctcattttctgggtgcggccttcggattacgcgaatatcaagcaatacttgcaggatatttttgcgcacctgacgtttacgcagacgttttggccggaaagctacatcggcacaaaatttccgacagcactgtggacactcggcgtggaaatgcagttttatctcgtcttccctttgctcgcgcgcgtgttccgtcgctttccgcttgtgtgctgggcggtgctttccgttttggcgcaggtgtatatcgtgctttttgcacatctgccgcaaggcaacgcagaaagcctgcgcatcaaccagttcccggcgtttttgggtgtatatggaaacggtatgctgtgtgcgctcttcttctgccgcctacggatatggcgcgagcgcgaatggaaacaaaaccgcgttctgccgcttgcggcgctgatgctgcttctgttcaacggtgctgccattgtgtgtatgttaaatgacgggctgagccgtgcggcaatcatccagcgctggcaggtggattaccgctttctgttttctgcgatgatctgcgttttcattttgcttttggatgctgcaccgaaaggcgtgcaatggctgttttcaaaccgcatagctgcttttttgtcggcggtctcctataatttctatatctggcacagcacggtgcttttaaagctgaaagcgtggcgcattccgtattacccggatgccccggagggcgctgccgcgtggccgcaatccgcaggcggcgagccgtggcactttgcttggcaggtgaagtacacggtgctgttttgggcgtgtgcgctccttttggcggcgtttttcacctatcttatcgaaaaaccgacagcaaaacagctgctcagaaagaagaaaatcatccgtacatagaaacagaccgccgcggcgtatttcacgcattcggcggtctgtcttcatattctgtccgggttacggaaaactattccgttttgccgtcttctttctggccgtaagcgcggtcggcggcttctcttgcaatatcgatgacgctgtattcgcgcttttcgccctgttcgatgataggcagcatttggtagacttctgccgccatgccgtgcccccaaagcatggggtcgatacgcatggagtagccgtggccgttttcgcacatccagtcggtcattttggcgcgcggcaagccgtaagccgctaagatcgtcatgatgacgccgccgtgtgtgacgagcacggcactctcatctcccgtcatcatcatgtttttaacgagcatctcaaagcccgcacagacacgctgcataaatacgatgctgctttcgccgttcggcggggcctcgtgctggccaccgttcatccaggcgacgaacttcgggtcgtttttcaattcttcggcttttttattttcccaatcgccgaagtcgcactcggcaagctctaaaataacttccgggtcggcagtgggatataagaccttcagcgtatcgacacagcgcacacacgggctggcgtagtacttttttgcttcggggtaaatgcccttacgtttcagctccaaaagtgcctgaatgccctcctgcgcaagcggagactgtgtgcggccgatgtaacgaccctccaaattgccctcacatataccgtggcggattaaatgaatggtgtaagatttcatgcgtttttcctttccgggacggtaaaacgctgccgttgcgtccctttcaccaaaaattcgcgggaaaacccgcaaaaaaggttcgtttatctgtttacttctcggataatttcgtttataatttacagtgtgttattttttgactcaggtggtgaaacttttgtgaacagtgattttccgcgcattctgacactgctgcgcaaggaacagggtatcagccagaaaaaggctgccgcagaccttggcatctcgcaggcgctgctctctcattacgaaaaaggcatacgtgaatgcggtttggacttcattgtgcgcacggcggattattacggggtctcctgtgattatctgctgggcaaaacaccgcaccggcagggcgaaaagctgcatgtgccggaaacggaggaggaagacacgcacgatggtctccccaacgtgagccgaaaaataatatcgaactccttacatattgtatttggtattctgaaaaaaatcaatagcaaatctttaacaaaagagatcacgctgtatttgagcggcgctgtgtataacgcgttccgcatgctgtatacggcgaacccgaaaaatccctcggctctttttgagacgaaggacggactgagtgaggcgctgaccgacggccgtatgcagctggcgcgtgccaaaagccgcgtgatgctgctcggcgaaaaagtgtcggacgacgaggccgttaaaaaagacgacctgccccagctttccggcgagatgctctcggcggaatatcccgattgggcgccctcgctttttgcattgattgagaataccgaaaacgaacacaaggaaaactaagtaaaccaactgcaaaaaggaggcaaactgtatgtgtggttttgtaggttatattgacggcggcgaaacacagcttatggagcccgtgctgcacgctatggcagaccgcatccgtcaccgcggcccggacgacgccgactattacatggacggcgagatctcgctcggtttccgcagactttccatcattgacctcgagggcggcagacagccgattttgaatgaagataaaagcaaggttctcatgtttaacggcgagatttataactatcagtctctccgcgaagaccttttaaaggcaggccatgtatttacaacgaaaacggacagcgaagtgctgctgcacggctttgaagaatacggcaccgacctgctcaataagctgcgcggcatgttcgcgttcatcatttgggacaagaacacgaaaacgctgttcggcgcgcgcgattactttggcattaagccgttttactatgcaaagatgcagggcacgttgatgttcggcagcgagatcaagagctttgtggaacacccgcactttaagcgcgaactgaatgaacgcgcactggaaggctacctttctttccaatattctccgggctacgagacattcttcaagaacgtttacaagctgccgcctgcacattatttcttctacaaagacggcaaaatggatatgcagcgctactggatcccggaattcaacgcggaagaagacaagccgctcgaatattgggtagacgagattgaaaagacctttgacgactccgtgaacgcacataagattgcggacgttgaagtcggctctttcctttcctccggcgtggattccagctatgtggcctgctctgccgatgtggacaagacgtttacggtcggcttcgacaacggcgaaaaatacaacgagatcagctacgcaaaggagctttccgagctaattccggtgaagaattacagcaagacgattaccccggaagagttctggggcaacttcggcaagattcagtaccatatggacgagccgcttgccgacccgtccgccgtggcactctatttcgtgtgcaacacggcttccaaatatttgaaggtcgtgatgtccggcgagggcgccgatgaaattttcggcggctacaacatttataaagaaccgctcgccgtaccggcttatgataagattccgttccccatccgtcgctttatcggcaaagtcgcttcgcacttgccgaagaaatccggcatcaacttccttatccgccgcggcaaaaagctcgaagaccgcttcatcggcaacgcgtacatgttcactgaggaagaacgcaagaagctcctgaaaattaagaccgatgcaccgtccccggcagaagtcgtaaagccgttctatgatcgcgtaaaggataaagacccggtaacgaaaatgcagttcgttgaccttaacgcctggatggtcggcgatattcttctgaaagcggataaaatgagcatggcaaattcccttgaagttcgcgtgccgttcctcgataagaagattatggagcttgcggaacgcatcccgctcaagtaccgtgtaaacgacgagaacacgaagtttgcgatgcgcaaggccgctttgcgccgcatgcccgaaaagtgggccggcaaaaagaagctcggcttccccgtgccgacgcgtgtgtggctcaaggaagacaagtactacaacatcgtaaaggagaaattcacgggcgaagtggcacagaaatacttcaacaccgacatgctcgtaaaactgctggatgaccacaaaaacggcaaggcggacaacagccgccgcgtttggacggtttacacgttcctcgtgtggtacgaccagttctttaacgatgatattctcaacggctatgcggagcacacagatgcaaagaccgcgtaagtatttggaaggaaaatgaagatcatgaatacagaagcattaaaaagacaagattttctgccggttctgctcggcagtgacatcaacgtatacggcatggcgcgttctttccacgaggcttacggatacaaaagcgtagcggtcggcaagggcatcctccccgcctgcacgcacagccacattgtggaagttttaaaggtagaaccgcgccttgaagaagacgacgtgtttgtcagcacgctgacggaatttgcaaagaacttctccgggcagagattactgctcgtcccctgcggcgacaactacatcaaaatgcttgtgcgcaaccagacgaagctgcgcggcatttatgaattcgagtgcatcagcgaagagcttttaatgcgcctttccatcaaggaaagcttttatcaggtctgcgaggaacatggcttctcgttcccgaagacaacgacctgcacgtatgagaaccacaagaatcttgagctgcctttcgacttcccggtcatcatcaagccctcgaacagcgtggcatactggaactgcaagttcccgcacaaaaagaaggttttcgttgcaaacacccgcgaggaatttgatgcgattttggacgccatctacggttcctcttacaaagatcacctcattttgcaggaattcatcccgggtgacgattctaaaatgcgtgtgatgaactgctactgcggcaaggataagaaagtaaagctcattgcactcggtaatgccgtgctcgaggagcattccccggagggcatcggcagctatgcggccatcatcaacggctacgacgaaaagctgaacgagacgatgaagaacttccttgagggcatcggttacgtgggctttgcaaacttcgatatgaagtacgacgagcgtgacggcaaatataagctcttcgagatgaacctgcgacagggccgcagcagctatttcgtaacggctgcgggctacaacattgcaaaatggcttgcggacgacgtcatctacaacaagcccatggatcttaccattgccacaaataaagtgctgtacacaatcatcccgacgaagatcatctttgactattgtccggacaccgccgtgaaagcggaagcgaaaaagctcatcgacgaaggtaaagtggttaactcgtattattacaagaaagaccgcagcctgatgcgctggctgatgttccgccgcaaccagcacaactactttgaaaagtacaagcgttattttaacaacaaaggactgcgtgactgatgaacagtttaggcgttatcggcggactcggccccatggcgacggcgtatttattagagcttatcaccgacatgaccgatgctcgcaccgatcaggagcatcttgacgcgatcatattcaatcgcccgagtgtgccggatcggaccgcatacattttagaccatacaaagccctcccctgtgccgccgatgatcgacatcgcacagaaattggaggcgctgggtgtgtgcgcactcgctaccccgtgcgtgacggcacacagctttcacgatgaactgcaaagcagcgtacacattccgtttatccacatggtgcgcgaaacggcagcatatctaaaagaagccggctgcaaaaagcccggcattatggcgacaaccggtacggtgcacatgggcttatttcaaaccgcgctgaccgatgcgggtctttcctacgttttgccgaacgacgaaatgcagcagaacgtaatgtcgctcatttacgactgcgtaaaagcaggtgaaccggcggacatggtaaaattccgcgccgtttccgacgctttgcgcgcggacggctgcgacgctattattttaggctgcacggagatctccatcatcaagcgcgataacgagcttgggcccggttatctcgacgcgctggaagtgttggcacgcgcgtgcattttagcgtgcggcaaaaaacttaagccgaaatattcttccctgatccaacaataaaagcataaggaggcgttttgtatgtgcggctttgccggttatattcacaactacggaacgttcgataaagaagaagtcatccataaaatggccgaccgcatcaagcaccgcggcccggatgatgcccattattacattgacgacggcattgccctcggtttccgccgcctttccatcatcgacctcgagggcggcagacagccgattttaaacgaagacggctcgctcgtgctgctctttaacggcgaaatttacaactatcaggagcttcgcgaagagcttatcaaggccggacacgtcttcaccacaaagacagacagcgaaacgattctgcacggatacgaggaatacggcaaaaaaatccttgaccgtctgcgcggcatgtttgctttcatcatctggaacaagaacacaaaagagctctttggtgcacgcgatattttcggcatcaagccgttctattactacaaaaagggcaaggaattcatgttcggcagcgagatcaaaagctttctctctcacccgaattttgaaaaagagctcgacgaggatatgatcccgttgtacctttcctacgagtacagtccggacgagcgcacaatttttaaaaatgtcttcaagctgcccggcgcacactgcttcacctacaaaaatggcgaactgaaagtggagcgttactataagatcgaatacaagattgaagacgacaaatcgcttgaatactgggaggacgccatcacaaaggagttcacggagtccgtctccatgcaccagattgccgatgttgaggtcggctgcttcctctcctccggcgtggattccagctatgttgtgaaagaaatctccaagggtacgaagaaggtcaagacattctccgtcggctacgaggaggaaaaatacagcgagctgccgtatgcgcaggacttctccaatgtcatcggcgtaccgaacatcgcgaataaggtttccgcagatgagttcttcgacgcggtaccggagattcagtattacatggacgagccgctgccgaacccctcggagatcccgctctacttcctcgccaaaaatgcccgccgctatgtgaaggtcgtgctttccggtgaaggtgcggacgagctgttcggcggctacccgatgtatcttgcaggcggacactttgaccactattcgcataaggtaccgcgtccggtgcgtaaagtcctcggcacggtcgcaaagcactgcccgaacttcaagggcaaaaacttcctcgtgcgcggcgccatggagccgtatcagcgctttatgcgcgcaaactacgttttccagagcgcagagcgccaaaaattcttgaagcgtcccatcgcgagcaaggttccggaggaatacagcaagcgctatttcgacgaagtatcgaatctcgacgagccgacccagcttcagtatgtggacatgcacacgtggatgatttacgacatcctactgaaagccgaccgcatgagtatggcaaactcccttgagctgcgcgtaccgttcctcgataaaaagatgctggagctttccacacgcattccttcccgctaccgtgcagcaaacgaaacgacgaagatcgccctgcgcggcgcggctatcaagcagctgccggagcgtaccgcgaacaaaaagaagctcggcttccctgttccgctgaacgattggctgcgtgaggataagtactacaacaaggtcaaggcggcgttccagagcgatattgcggagaaattcttcgtgacaagcgagctgatgaagctgctcgacgaccacaagagcggcaaggcgctgaacatgcagaagatctggtcgttctatacgtttatcctttggtatgagcagttctttgtgctgaactgaatatagtcgaaaacagcgtcaaattacagattggcgctgtttctttatggaattattctgttttgttaacaacagacaagcaaattttaaagaaaaacaaaagctttattcttcccttttgggggcggaataaggctttttcttttaccgctttatcgtcttgcacggcggtacgcggccggtgtttcgccggtgatgcgtttaaactggcggatgaaatggtatgggtctgcatatccgctgtgctcggcaacttccgtgatgggcaagtcactgccggagagcaataaagactgtgcataacgaatacgcgcttcaatcaggtcgcgcatgggcgatgtaccaaaaaccgcgcggtataacgcatgcaggtgcgaagcgctgacagacgcaagcgatgccatttgcggcacagtccagtgcttttccggatcagaaagcaccgtgtgacgcaggttctgcatcttttccctatctgcacggctgaccgcaggtgagtagttttcttccgctatggcgcgggagaaacgcacaagaaattctgtggtgtatgcttccaacaagtcctcccgaaacggttcattagagaaaaatgcagcttccgtttttcggaaaaggccggagataaactctgccgcacgtggataaagcagtgtgttttctggaatacgatagcgcaaaagctgcacgcgaaagccaggtgcaaaatgcgcccagttgtgcgtgaggttactgtctgagtgaaaccactgtggttcatccggcgcatagaaaatacacgcgccgggtcttactgtgaccttttccctgttaatttcaatctccacgctgttcataaagtgcaaaaacgtgtagatttcaatgcctgttgggcgcacaagtgtaaacccggctttttccggccaatcgtggcgaatatctgtaatctccattttgacgccccctttgctttaattatactcaaaaattctatgtgtcgcaatagaataagtcaatttccgcacatgatacgacattgtattttacaaagagatcgcgtacaatgaaaccgtaatcaaaaagcgcggcagaaattgggatttgccgtcttttcgaggaaaggatgtacgaaaaatgagtaatataccgaggaaagaatatccgcgcccgcagtttgtgcgcgaaaactggatgaacctgaacggcacatgggcgtttgagatcgataacggccgcagcggtgaggcgcgcggcttacagaaggtcggcacagcgctcagcggggagatcaccgtgccgttctgcccggaaagcgaactttccggtgtgcagcacacggatttcatgtacggtgtgtggtataagcgcactgtaacggtcacagaaaaacagctgaagggccgcgccgtgctgcatttcggcgctgtggattattgcgcaaaagtttttgtgaacggcaagcttgccggcacacacaagggcggctatgtttcgtttgagtttgacgtgaccgcacttttaaaagcgggcgaaaatgaaattgccgtctacgccgaagataatacgcgcgaccgcctcatcccgagcggcaagcagagcgagcaatataactcatacggctgcttctacacgcgcaccacgggcatttggcagaccgtatggctggagttcaccccgaaggcttatatttcccgcgtgcagtattatccgaacatcactgcaggcacggtgacggtgaccgcagagctggtcggtacggcaaacctcacagcaacggcttcgtttgaaggcaaagaaatgggcagctacacagcagaaaacgcctgcggcacgcatacattcacgataaagctgagcgaaaagcatctgtgggatgtcggctgcggcaatctgtatgacgttgcattcgctttcggtgaagataacgtcacgagttatttcggtctgcgcgaagtgcgcctggacggccacaagttccgcatcaacggccgctctgttttccagcgtctggtgctcgaccaaggcttctatccggatggcatctacactgcgccgagcgacgaagcgcttgaaaacgacattaagctctcccttgccgtcggtttcaacggtgccagactgcatgagaagatttttgaagagcgcttcctctaccacgcggaccgcttaggctatatcgtttggggcgaattcccgaactggggtctcgattcctcctatgccgattccgtttacggcattttaccggagtggacggaagagatccgccgcgattttaaccacccggctattgtcggctggtgtccgtacaacgagacatgggatactgacggcaggaaacagtttgacgacgcactcgacatcgtctacagagcaacgaaagcgcttgatcctacccgtccgtgtattgatacgagcggcaactatcatgtggcaactgatattttctgcgtgcatgattacgagcagaacccggagatctttaaggagcactatgacaagctaatgaccgagggaacactgtttgacaaccacgcgcaccgccagacctacaagggcgaagcgacgttcgtcagcgaatacggcggcattcagtggagtcaggacgagagcggttggggctacggcaccggtccgaagaccgaagaagaattcctcacgcgctttaagggccttacagacgcattgcttgataacagtgaaatgttcggtctttgctacacgcagctgaccgacgtggagcaggaacagaacggcctttacacctatcagagaaagccgaagtttgatcccgcgttcttccacggcgttttgagtcgcaaagccgcaatcgaagactaacagatacgtttggtgcccgcagtttttccgctgcgggcacttttttatcaaaatacaggaattttgttgattttcgtcatacgtacgtcacaaatgcatagtattctatataatagagtaattttgggcagcaagcttctgctgccggatgctgttctgaggagcgtatttatgccgcaaaatcactttagagaaccgaaaaaccgacgtgaacatcttctctcttccctaccaatcgtcttgccggtggcagccgtgacgatatccgccgccgcgtttggtctgctgttcctgcaagggaatccagtggaaagcgtggaagaatccctcacatacactgcagcgattggcgcagctgacgagcaggtggaaatgtacgtctacgacgcgggcaacgatgaagttgaggaagccgaagaagaagcttcggaaatgaatgccgcgtcttcctatgccgcgaaagagcgcattttgccggctggcgaagtagaagacaccgctgagcttgtagatgcatacagctctgtgccactatttgtttcaagcggcaatcttgcggagcaaggcgtgcagacacggcttgagctgcttgaagattattttccaaacggcatgtactggaaccatgtcggtgtggacacaagcgaaatgacggcagacgaaattgccatgtgcgttacagacacgccgtgcaaccattccgtttatggttatggaaactgcaacatttataacggtctgatggatgattttttcccgcagtacgaagacgaaacgcaatgcctcggctacgcttccctcatcagtgacctgctgttcggctacgatgcaccgattacggagttttatgactttgacgagctgcgcatcggcgatcacatccgcatgggttggtatgagcactcgatgatcgtgacggatatcgactgggataccgataccattaccgtgacggaagtgaatgtagattatgaaaactgccagatctcttggggtcggcagatcacccgcagcgagcttttcggcatggaaggcgaccttacctattacacgcgctacgcaaattaaaaatcggttattctgcgcctcggcaagattttgatgtcttgtcggggcacattttatatttcccaaaagttatacgatacaaaaacaccccgaacgacgcaaaatcgttcggggtgtgctgattcaaagaatcaattatttaaccatgttggcaacttcgcttgcgaaatcgtcgtttctcttctcgaggccttcgcccttctcgaagcgaacgaaatccgtaaccttcatcgtgccgccggccttctttgcttcctcagcaatgtactgctcaacggagaggtcgccgttcttaacgaacgcctgctgcaggaggcagttgttctcatagaacttgccgattctgccggtaaccatcttctcgatgatgttctgcggcttcttggagttcttcggatcgttctgaatctgaaccatgaggatttctttttccttatcgagtgcttcagccggaaccgtggacttatcgagataagccggattcagagcggcaatctgcattgcgacgtccttgccgcactcgttgagaacttctgccggaatgttctcggtctcaaaacgaacgagaacgccgattctgccgccgccgtgtacgtaagcaacgcagtcgccctcgtaacggacgaaacgacggatcttgatattctcgccgatggtgagaatcttatccttcagcatagcatcaacagtcatatcggagccgtgtgccttagctgcaaggagagcttcaacgtctgccgggttctcatagataacagtctcggcacaggtcttaacgaaatcgatgaactgagcattcttcgcaacgaagtcggtctcagcgttgacttcgatcacaacgccaaccttaccgcactcgctgaccatagcgtatgcaacaccctcagctgcaatacggcttgccttcttaacggaagctgcaagacccttctcgcggagaatctcggttgccttctctacatcgccctcagcctctgtgagagcctttttgcaatccatcatgccgcagcctgtcttagcgcgcagatctgcaacgtccttagctgtgaaattcatttcaaatcaccattccttgtagaatcttaaactctatatcaaacgaaaggaatttttaaccgaaattaaattattcctcggtctcagcagcagcttcttcggtctcctcagcagcagcgcccatacggccctcgcggccttcgatgatagcgttagccatagcacctgcgatgagcttaacagcgcggatagcgtcgtcgttgcccgggataacgtagtcaatctcgtccggatcgcagttggtatctacgattgcaacgatcggaataccgagcttcttagcttcggaaacagcgattctttcctttctcgggtcaacaatgaacagtgcgcccgggaactccttcatgtccttgatgccgccaagatacttttcgagcttttcgatctcgagctcaagcttgctgacttccttcttcgggagcagttcgaaggtgccgtcttcctgcatcttgcgcagctgtgcaagtctctggattctgcggcgaatggtcgtgaagttggtgagcatgccgcccagccaacgagcatttacatagtaagcgcctgcgcggagagcctcttccttaacggactcctgagcctgcttcttcgtgcctacgaagagaacgctcttgccttccatggaaaggtcacgaacgaagttgtaagcctcttcgagcttcttaacggtcttctgcaggtcgatgatgtagataccgtttctctccgtgaagatgtactgtgccatcttcgggttccatcttcttgtctggtgaccgaagtgaacaccggcctccagaagctgcttcattgatacgactgccatttgaaaatacctccttggtttttcctccgccgggctgatattttcggggaaaaccgctttcgcggcaccaatccgagagcctcggcgtgcgtttttgcttgcagaatctgcaaatcgctgaactattatagcataacatgccgggtaaagcaagtgttttctatccgttttcaaagaaattttgtaagaagctgcgcttcggtgtccgctttacgggaatgtgatcgaccagcaccgcatcctccccaatggtcttcacagcgctccatgggatcacacagtcattctctctgccaaacaatccgaaaaagcgcggacggccgtacaccacgatcgccgtcagtgccgcctgctgtgtatcaaattcaatatcgccgagatacccgatgcgcgagccatccaaaacactgataacttctcgcccatgcatttctccgatgcgttctaacatatcgctcccccgtttcgccgtatttttccgatacagcctatgcacagtagggatacattatgcgtttgcatcctttaaaatgacttcggcaatcgtttcggcggcaaggttcgagcccgcttcgttcggatggctgccgtcgtcgttgaacagattatcggtttcggttttttcataaaatgcactgccgacatcggcgagcagcgtgtggtttttctctgccgcttctgcataggcttcgtgcattttgcggtacatctcatcgtaatctataccgaatttttgaagctgtttgccgtctttttggtatgcccatgtcgcatacagaacaggtacggcaccgttttcacgaattttaccgcacaaatctttcacgctctgcataaaactttcctttgctgtgatagggccgttgctcatctcctgcaaaacgacgtaatcccatttttcattttgcagcagctccaatgcttttgcgccgagccttgtttcagggttcagctgctcacgtaagcgtgcaccgccgcgtgtgttctgtactacttcggcacccgtgatttccgccagtatactcggcagatcatttgtaaaaatatagctgtttccaagcattaaaatgcgcatatttatttctcctatcctcatggtactttatcatttataatatagcacattttcgcagtttagacaagaaaagccgcccggtttttacaccgagcggcgaaattcacttgtttctttttagtattttcttgctttaatcagcaatagaactccatcggatacgtgagatacttgttcgggtcaagctgatcggcagtaacataaccggccggtgcacaaatgaggctcggcagacgattgacaaccgtcgcgcaagtatgctcaacggttgcaggcttcacaacatggaactcggtgttcggctcgccgatgatttgccaatcgcacatatcgccgtcttccgggccgtagaccttgccgatggtctcctcttcgatggtgatgccctgcattgtctcgatggccacgacggcagacatgccgatgcagcggccggcttcgatggtcttgccgagcgtctcggagtaaatgtcgtgatcgatgatgcacggcacatgcttctggttgatagacttgattgtcaggccaagcttattgcaaatggcttcgctggcattccaagcgtaggacggctcaaaaatgtccgggtgcgcaatcctctgctcaaactcttctggtgtcaggtcgcagccatgcgcatttgcgagcgctaatccatattcctctacgttgtagctgtacgcgcctttaatcttcgtaattttgtggcaaccgcccgcgacgagcgcgaccatgttgatccagaagatatcctgcatgccgctgcccgtgatggtgcagttattcgctttagcgatagcgtccagacggttgacctgaaccgcagaggtcgtccacggataaatcgcttcttcgcatgtcgtgatgacattgagtccgcgtgatacacatttttccacatggtcataaatatcgccgatgaagctgaacagcgtcacaatcgcaacatctgcatcgcactcatcgagaactttatccgcattgttcgaaatcagtacgccggtcttaaggccgagacccgcgaaatcaccgacatcctgcccgacgaccgccgggtttacgtcgatcgcgccgacaatctgtgcgccgtgctcatgcagataccgaagaatgtacttgctcattttgccgcagccatactgcacaactctgattttttccacaagaacttcctcctttgatttggatttcaaatttatcttcgcgggacatcccgcttgtcttcgcttatagtatatcctcatcttagtttagagtcaaggaagttttgtgaaatttttattaatcttttattcgtagaattctaccgacacttgaagctgcaaaaatatatgcacaccaacctataccggaaaagcttaagccttcgtaaaaccaagattgatcggattgatgcgcgagccattgcaacgatgctaatgtctaaaagaacgatatgcagaaaactcgctttcaatatcttcgttatagttgcgcaaatttggtgatgtaggagggcagtatacaaacgcgcaaaacataaaaaagcccgcaaacccagccatttcaagggattgcgagcctttgaggtgtggtgccggtggcgggggtcgaacccgcacgatgttgccatcaacggattttgagtccgtctcgtctgccaattccaacacaccggcttaacaaaatttattatacgttaaaccggtggaaaaagcaagtgtttttttaattatttcgaattttattcgtttgcgggcacagaaacgtcaaaataacggtactttgcttcgcagtccccctgcgccgtaaggcccacaaagcagcccgtaaacgtgcagttcatgcactctgtggaaagcagctgcgtgctgccggtgccgatctctttcatctcttccccggctttacccgcaaggaacgtatagcgcaggcggttggccttgatgcacagcgtcagcgtgtccgtttccgggaagaacaccggctcgctctcgatcagcatatcgaccacgcggcggcgcagcgtgacctccataccgccgtttttacgctcggcaaacagctcatagtggtgctcgttcgtgtggaaaaccgtcatgcccgctttgccgtcgccggaaagcgtcatttcggtcgtatagttcaaaccaaactgctgttggcgcacaccgaagaatatgaccgtcttcagctcgtcaagcgtcgcctcactgccgcgcagtgtaacgccgctcttatcaaatgtatacttcatgcggtcgggtgtgcgcagatagctccagcgcggtgcaggtgcagctgtgttgaaatcatcgtgccaactgcgcgcaacacgcacgtctccttcgccctctgccgtcatgatgggctgaatctccttgccaccgtatacgaccggccagccgttctcctcccatgtaaccggcgcaatcatcgtctcgcggccggtgtgatgcagcatgaaaacagacgggcgaatgccgtgaaataccatccaccacttaccctccggcgtctctacaaggtcggcatgtccgagcgcctgaaactccacgcggtgtgcattacgatgcgtgaggattgggttgtgcggacaagattcgaacgggccccacacgcttctactgcgcgcaatggtctccatgtggccgtactccgtaccgccctcggcaatcatcaagtaataccaattgccgatgcggtacatgtgcggtccctccgggcatttgccgccggtaccgtaccaaatgcactttgtctcgctcagctttgcaccggtctcaagatcaatctcaaactgtccgatgcagttgttgccgttttcgtccgtatgtgtgccggtgtaatacaccttgccgtctgcatcccagaacaaagatgggtcaatgccctgatggtcgatccagatcgggtcggaccactcgccgcggatgtcatctgtccacacaaaaaaattgccgccgcctgtcacattcgtcgtgatcatatagaatcggccgtcgtggtagcggatcgtcggcgcaaaaataccgccggaggtgcggcagtccaccagcggcaactggctttcgcgcgtcaaaacatagccaagctgctcccaatgcagcaggtcacggctatgccaaagcggcacgcccggaaaaaactcaaacgagctgttgacaagataatagtcttcacctacgcggcaaatgctcgggtccgggtaaaaacccggcaggattggattttcgtatgtcatgtgcacgcctccaaatttaaacgtttgggcatattgctcttgcttctttttcactatataatagtatatagtctgcgttatcaaaaagcaatgcggataaaagaaaaacccggataacttccgttatccgggtactggcggagaggatgcgactcgaacgcacaatgccttgcggcacaccacatttccaatgtggctccttaccattagaatacctctccaagcgacggttgttattatagcgcatgtctttcaaaaatgcaagtgttttttcaaaaaaatttcattttatttccttttaggcaatattgtgcaaaatatttgcacatttatatattaaaactatatagcaggctgtatctttttcattcaattgtatggctcacgtatattttatgtaaaattcggcgaaaacagggtgctttttcctctcgggtttgctataataaagtaaatatctcaagaattcttgcgggcccgctttcggcggcgctccgatttagttgctctacattgaaaggcggtgctcatattgaataaaaaacttccgggcgggccggctgcggtcatcgagatcggctccagtgcggtgcgcatgcgtgtttcgcagttaaagcacggcgagatcgaaatgctggattctctcgaataccctgtgttcttcggccacgaggtcttcaccacgggacgcatcagctttgaaagcctgcgccaactctcctctatcctcacaaaattcacaacggcgctggagggctacaactgcaaaaacgtgcgtgtggtctcctccaccgtgatgcgcgaggcggaaaaccgctcgttcgtcatcgatcaactcaaaattcacaacaatctgcacttggaaattctggaatacagcgaagaaaaagcgctcatctgctccgagattatccggcttttaaaagaagaaagcaagatcgaaatgaaagacgcgctcatcgcgtatgtcggcacgggcagcatcggtgttgcgctgtacgacggcaaggcgatctgcacctcgcagaacatccccatcggctccttaaagctgcacgatgccctcggtgcgctcagccgcgagtgcgacgatttttaccccgcggtcgaagaatatctcgacatcattttaaaccgcgtcgatattccgaaaaaagacattcgcagcatcattttgacgggttccgatctggagcttgtcgcctccgtgtgcggcgccgaaaaaagcggcgacctttacaccatctccgcaaagaaaatgcacgcggcgtataaggaaatccgcatgatgtcccattctgccatcgcacgccgctacaacattcccgaggagcttgccgaaattctctacacagcgctttctatatataccggcatgctgcgcctttcggacggcgtgcagaaggtcatttgcccggatattgatatttgcgatgccatcacacgccatatgctcgtgccgggcgcgcaaaaagaatacattgcgcaaacgaacgaaagcgctattgtttccgcaaaacgcatcgcggcaaaatacaactgccacggcgcacattccgacgccatttcagagtttgcatgcacgcttttcgacaaattcaaaaacctgcacggtctgtcaagtgacaaaaaaatcattttgcagctcgcgtccattctgcacagctgcggtcaatacatcaacgtgcgcatgccgaaccagtgctcattcgacctcattaaggatctcgacattttcggcctcacgcacgaacaaattctgctcacggcattcgttgccggcagcgatgagttcaccatgccgaatgttgccgatgcaggtgcaatcccgatgacggaagaacgccgtttggaaatcttaaagctcgttgccatcttccgccttgcaaacgcgctcgataaatcgaagcgccgtaagctgcgcatcagtaaaatccgcattacaaacgaaaagctggagatcaaagccgtcgcttccggcagtgccctgctcgaaaaatgggcgtttgaggaatgcgccggtctctttaaggaagtattcggtctcagccccgagctgcaaatcaaaagcgagctgctgaaataacgaaaggacggaaaccatgtctgataaaaagaattactattataaccgcgagctgagctggatggacttcaatgcgcgcgttttggaagaagcccaaaagaaagataaccccctcatggagcgtttgcgcttccttgccatcaccggctccaaccttgatgaattcttcatggtgcgcgtggccggtgtaaaaagccaggtcgcatcaaactacacaaagccggatgattccggcatgacgccgaaggagcttctctcggcgctcgataaaaaaacgcacgcctttatggaaaagcagtattcctgcctataccgctctattttgccggtcctcaaaaagcaggcggaaatcgagttccgcacgccggaaaagcttacgcacgagcaaagagcctttacggacgagtattttcatcgcgtgctgttccccgtgctgacgccgctcgccgtagacagcagccgcccgttcccgatgctcgcaaataaaagtctgaacctcgccgtgcgcctttcttccaaggaaaacaagggtgaaaagtgctttgccgtcgtgcaggtgccgtctattctgccgcgctttacggagctgcccgcagacggcgacacacgctgctttatcctgctcgaggacatcatcaccgattatcttgaggagcttttcgagctgcacgagattaaagccgtgtgcccgttccgcatcacgcgcaactccgacctcaccatcgacgaggaagcggacgactttatgtatgagattgaaaaatccattaagcgtcgtaagcgcggccgtcccgtgcgtttggagctcttgcagcacaccgatggagatacccgcaaatttctcataaaagcgctgaacatcaatgaaaacggcatctacgaggtgcagggacccattgacctcacgttcttctcgaaatttgcgaatatcccgggctgcgaaaaactctgctttgcgcccgttcgtcccaccacacccccgggcgatttcttcggctacaccgatatttttaaggccatccgtgagggcgaccgccttgttcaccatccatatgagacattcgactgtgtcgtacagttcatcgcacaagccgcagaagacgaaaacgtactcgccatcaagcagacgctctaccgcgtcagcggcaactcgcccatcatcgcgtcgctcatcaaagccgccgaaaacggcaaacaggtcacggtgcttgtcgagctgaaagcgcgctttgacgaagaaaacaacatcaactgggcaaagaagcttgaaaaagccggctgccacgtcatttacggtctgaccggcctcaagacccactgcaaaatcgcgcttgttgtccgccgcgaggaagacggcatccgccgctacctgcacctcggcaccggcaactacaacgactccaccgcgaaaatttataccgaccttggcctgttcacctgcaacgagcagttcggcgcagacgcgtcctcccttttcaatgtcatcaccggctattcccgtccgccggagtacaagcacttcatcgttgcgccgcacggcatgcgcagcttctttgagtacatgatccgtcaggagaccgaaaacgctaaaaagggtttgcccagcggcatcacggtcaaagtcaactctctcgttgacccgaagatcatcgagcttctctatgaagcctccaaggccggtgtgcgcgtgcagcttatcgtgcgcggcatctgctgcctcattccgggcatcgaaggcgtcagcgagaacatcactgtcatgagcattgtcggtcagcttctggagcacagccgtatcttccgctttgaaaatgccggcaacccgcgcatttacatgggcagcgcggactggatgccccgcaatctcgaccgccgcgtggagcttgttttccccatcgaggacgaaacacagaaggcccgcgccttcggcattctcgataccatgctgagcgacaccacaaacgcccgtttcatgcagagtgatacaagctacgagcacgttgacctgcgcggcaagaagaaaatcagctcgcagcttacattctaccatgaagcacaggcgcgtctgaaagagctgcagtccatcgaaaaggacagcgttttgatcccgattcactccgcggaagaataaggcttgcatagttgtaaataaaagattataatagaataaattgagcggacttcggcgcgttttgctgtccgcacaccacaacgaaaggttgaggaacgatgaaaagaatcggtattttaacaagcggcggcgactgtcagggcctcaatgcctccattcgcggcgttgcaaagtcgctttacgaagaattcggcaacgacgtagagatttacggcatcaaagacggctataaggggcttattttcggcgaatataagctgatgaaaccggaagatttctccggcatcttaacgctcggcggtaccattttgggtacctcccgccagccgttcaagctcatgcgcgtcatcgacgaaaacagcgtcgataaagtccagaacatgaaggataactacaagaagatgaagcttgactgcctcgttatcctcggtggcaacggcacacagaaaaccgcaaaccttctgcgcgaggaaggcctcaatgtcgtctccctgccgaagaccatcgacaacgatgtctggggcaccgatatgacattcggcttccacagctccgtggagattgcgacgaatgtcctcgactgcattcacaccaccgccacctcccacggccgcattttctgtgtggagatcatggggcacaaggtcggctggctgccgctttatgccggcatcgcgggcggtgcagatgtgattttgctgccggagatcccgtatgatattgacaaaatcgcaaaaacattggataatagaatcgcaaacggcaagaagttctccattctcgccgtagccgagggtgcgctatccaaggaagaagccgccatgaagaagaaggacttcaaaaaggcgcgtgccgaaatgaagtacccgtccatcgtgtaccgccttgcggacgagcttgcctcccgtgtggataacgagattcgtgtctgcgtaccgggtcatttccagcgcggcggcagcccgtgcgcctacgaccgcgtgctctccacacgcttcggcgcggcagccgcaaggctcatccgcgagaagaactacggcaacatggtcggccttgtcaacggcaagatcgtcccggtgccgctcagcgaggtcgcaggcaagctgaaaaccgtcccggtcgattgcgaagaaatcctcgcagcccgtgagatcggcatttccttcggcgactaaattcgcacaaaacgtcaaaagagacgttttaataaaaaggattgtattgaaaggattgacccacatgaaattttccgtcagtatgtacagctacatgcagaagatccgctccggcgaggctactccgtttgagctgatcgcgaagaccaaggaacttggctttgatgccattgagtttgtcgatttcaccgatttcggcaccggcaccaaggaagagcgtctcgcccacgccgaagagctccgcaaggaatgcgagcgcgtcggccttgagatttccgcactcgttatgagctgcgacttcatcaccggcagcgacggcgacctcgataaagagattgctcgcgtcaaggattacgtcgacatcgcacacgtcctcggtgtcacccgtatgcgccacgacgcagccattggctatgcacgcaactccggtgacttctgcccgtttgatacgatgctcccgcgccttgcaaaggcctgcaaggaaatcaccgagtacgctgcacagttcggcatccgcaccatggtcgaaaaccacggcttctatgtgcaggattccgagcgtgttgagaagctctacgcagcggtcgacaacaagaacttcggcctcctcaccgatatgggcaacttcctctgcgcagatgaggacccggcttccgcatttacaagagttgcgccgtatgcgtactatgtccatgcaaaggacttcatcgtaaagccgtttacggatgccgatccgggcgaaggcagcttccgttcccgcggcggtaagtacctgcgcggcaccattgtcggccacggcaatgtaccgatcaagcagtgcatgtatcagctgaagcgtgcaggttatgacgattgcatctccatcgagttcgagggcatggagccggtctttgatgcactgcgcatcggccttgcaaacctcaagaagtattgggctgaggtctgattcccctcatatccaaaaacctgatttaaaggttgggcttcgtgtcttttcggcacggagccttttcttatgcccctaacgagagatgtcgtatcacatgttataccactttgaaattaacttctcttctttttcgagtcatatcattttagcacggacaaagaaaacagagcttttttgttcccccgcttgcaatacaacttagaaaggtgtacaatgaaaatgaattttgcgcatctgtgtcctgcatagctgcacaagaacttaaggagtgattgaaaatgtccgttaaagaaaaatttctggattacgtaagctacgacacccagtccgattcctccagcaccaccatgccctccaccatgaagcaaaagctgctcgcacagcaccttgccgatgaaatggtcgctatgggcattgaagacgcacacatggacgagtggggttatgtttacggcaccattcccgcaaactgcgaaaagaagaacgtcatcggcttcatcgcgcacatggataccgcagaagaagtctccggcgcaaacgtcaaagcccgcgtcattgaaaattacgatggcgaagacattgtcctcaacaaagagctcggcatcgtcaccgatgttgaaaatttcccgattctcaaaaaattcaagggtaaaacgcttatcgttaccgacggtaccaccttgctcggcgcagacgacaaggcaggcgtagccgagatcatgcaggctgcggaagacatcatcaaaaacaatctcccccacggcgaaatccatatcgcatttaccccggacgaggaaatcggcgcaggcccggataagttcgacgtcaagggcttcggctgcgatttcgcctacacgctcgacggcggcgagcttggcggcctcgattatgaaaacttcaacggcacctccgccgaagtggagatcaccggcagaagcgtgcatccgggcagcgcaaagaacaagatgatcaacgcaagccgtgtcgccatggagttcgcttccctgctgccgagccgcgaagtgccggaaaacaccgagggctacgaaggctttgcgcacctcaacaacatggagggcgacgtagagcacgctcacctgcactacatcatccgcgaccacgaccgcgaccttctggaagcgagaaaggataaattcaacctcgcggccgagttcatcaaccgcaagtacggcttagagctcgtcaaggtcacactgaaggacgcatactccaacatgaaagaaatgatcctgccgcatcaggaaatccttgacgttgcccgcaccgccatgcgcaaaaacggcgtagagccggtcaccacccccattcgcggcggcacagacggcgcacgcctgtcctttatgggtctgccctgcccgaacctctgcaccggcggcgagcttgcgcacggcagaaacgaatttgccgttctggaagagatggagaccatcgtcgagatcgtcaagtccatcgccgagctcgttgaataatgggaaaggaacctgaaactatgctgcgatttggaacgatcggcaccggctggatcgcgaacagctacgtagacggcgctttggacagcggcctgtggcagctcaccgccgtttactcccgcacaaaagagaaaggtctggcttttgcagcgccttacggcgttaaaaccatctttaccgacctcgaagaaatggccgcaacggacaaaatcgacgcggtgtatatcgcaagcccgaacaaactgcatatcgagcaggcacgtgtttttctggagcacggcaagcacgtcatttgcgaaaagccgctttccgcccacgcaaaagatgtagcagagctgcaggcgcttgcaaaagagtgcgggctcatctaccttgaagccatcatgtttatgcacctgccgcagagaaagcttttggaagaagctttaaaaaagatcggcgatatctccgtggcgaagattgatttctgccagcgctcttcaaagtacgatgcgtacctcgcgggcagcctgccgaatatctttaaccccgcgctcgagaccggcgctttgatggatctcggcgtttattgcgtctatcccgcgctgtatctgttcggtaatccgcagaacacgctcgccgtgtcgcatttattggcgtccggcgcagacggcagcgacattgttgccatgcagtacccggataagctcgtgaacctcgtgttctccaaggtcggtcaggccggcgcgaatacggattttcagggcacaaacggcactgtatccgtggagtccatctcaaaactcgccaacatctccatccgttataacaacggcaccgtggaggaagtttgcggcgaagaagaaaaattcaagctgatgggctacgaagcgaaggatttttaccgttatattacagagcccgaagcttcccgcgcggaatacgagcggtgctccgccctcgcgcacgatgtttccgtctatatggaagaaatccgcaagctcgcaaacatccgcttcccctccgacaactaaaacataaaacaaaacggcaccgcatgatgaagtcttttcccgtgcggtgtcgttttcttatggagtaaattcagttttagcgtctcttttgttctttttacgcggactttccgggtcttcatctgtgtgccgaatatcctgcattacgtcccatggcgtcagcattccgagcaacggctcatcccggctccccgtcttcgtgatgaaaatgaccgaaaggcgtttgttgcgaccgcgtatcttctcaaacatacgccgcgcctcaatgcaggtcgttttctcgtcgacaaacgcaaagttttccacatgcttttctacggccagcatttttccaagctgtgaaagcgtcgtttccttcgtgatgcgcaaggttgggtcacgcaaaatgcacgaaaagatcgtggacacgctgaatacaccgagaaatttctctttttctataaccggaatgtgcgaaaagccgctcttgtccatgctttccatcaaatttaaaacgcgcgaagaaagccttgcacagcgaatgctgctgccttttgtcgcaaagtcgagtgcaagcggcggacggcaaacgtagtcgagtgcctcccgcagtgcttccaccaccggctcgctcggctccacgatcggctcgccgccgaggttcgcattgtgcgtcatcaaattgcggatttcccggcagagattcaacgtctcgcgcacaggtgcgctttcataatggttgatgtattcaaaaaccacgctggaataccgccgttgctttgcggtgctgaactttacctcaagctcatcctccagctgtttatataaatcgataaattcatcgctgcgcatggatcacactcctttttttcaagaataccacaaaaagtgcctccgcgcaaggctttgcagataacaaaaaacccgatacaaattgtatcgggtttctggagctgatggtcagaatcgaactgacaacctgttcattacgagtgaactgctctgccattgagccacatcagcatattgggttttgtaacgttaattattataccgaattttctccgtaaagtcaacccctatcgcgaattttcttttaaaaaatatttcgcgcggacaaaatccgcctacgccgggcggtttacggttgtaaccacgcacaatgtgtggtacaatgatacatacagaaattcaggatgggaaagggcggcttttcatgggttataagctggagctcggcgcatggagcgcggttttcgccgtgccgaacgcgcttgtagatcgatatatcaaggaggcggacggagatcagctcaaggtcatgctgtggcttctgcgccataacgggcggccgtatgcggcggaggatcttgcagccgcgctcggcatcaccccgcagcgtgtcgataccgcgctcggcttctggatgaaaagcggcctcatttgcagcgttgacaccccgctggatactgcccttacgccgaatcacgtggagagccccacggccgtcgcaccgcagccgaaagccgctccaacacagccgcagcgccccaccgcgccgaagcgtatgctgcgcccggacgggctttatatctcggagcgcgtagagtcctccccggagattcgccgccttgtagaggaagcgcagaacctgctcggcaaaacgctttcccccgcgctttccggcacgctcattcaggcgcacgaagattacggcctgccgtgtgaagtcattttaatgcttatcgcctacgcgaataagattggccgcgcaaacacgagctacatcgaatccaccgtgcgcaactgggcagattccaacattttaagcatcgccgccgcggaggaaaagctgcgcgagctcgacgaaaccgccatcgcgtggaagcgctgtgaaaatgcgttcggcatcacctcccgccgcgcacccagcaaaaacgagagccaatttgctcacagatgggtgttcgagtggcgcatgcccgatgagcttctaaacgaagcctataaccgctgtgtggataacaccggcaaggtcaacatgaaatacatcaacgccattttggaatcgtggcacaacgcgggcattcataccttgaaagaagccgtggatgaaagaattgccgccgaagcccgccgcgagggtgcgcataagccttcttatgaccttgacgaatacgaaaaatacgatatttttgctacggagaaataaaccatgggatatgcaaggcaggtctacacgcaagctgaaaatgaattaaacagacgtcgcaccaccgcgcaggataacgcacagcgccgcttagagaacttctacgccgtctgccccgaagcggaggacgtgcgcagacgcatcgcttccacagcaagtcgggcggctatggccgttttgcgcagcggcaacgcgcgagagaccatggaagctttaaaaaatgaaaatctttcgctgcaaaagcagtttgccgatctcctcgccgcgcacggtctcacccgcgctgacatcgagccgcagtacacctgcaagcgctgcgaagataccggctatgtagacggccgcatttgctcctgttaccgcagtttattaaagcagatcgcctacgaaaacctaaaccgtatctccccgctgacgctctcgtcctttgaggatttctccctgctctattattccgatgtttccgtaaacggcgagcgttccgaccgcgagcaaatgcgcaacatttacgacttctgccggcgctacgcagacaacttcaaaaaggacagcggcaacctgtttttcacaggcgctacgggtctcggcaaaacgcacctttccctcgccatcgccgcagaagccatcaataaggggttcggcgtagtgtatggcacggcgcagacttttgcccttgctctcgagcgcgagcgcttcacccgcaccgaagaatccggcggcgatacgctcgatcttttaaacgactgcgacctgctcatcatcgacgacctcggcatggaaatctcatcgtcttacatcacggcgacaatctacaatgtgattgatacgcgcatcacgctgaaaaagccgaccatcatcagcacaaacctctccatgcaggagctcgaaaagcgttacaacgagcgtttcacttcgcgcataatcggattctacgaccgcttgatctttcgcggtaaagacatccgcatgaagaaaaagctcaatccgcaaaacaaacaaaattagcacacaagcaaaaagccgaacggcatcggagctttccccgccgttcggcttttataatttattttaatacttcgcggattcaatctcttcaatcacgccgcgcacggctttctccaccgcgccatcttcaaacggcaccggaatgccgacataatgcagcagatcgaaatagcccagcgtgccacccgctttgcacagcttcaaataacgtgcccaagcgctctcgcggtctttcttcatctcgtcatagaagaagaatgtgcagatctgcgccagcgcgtaatcgatataatagaatgggtagaggaaaatgtgctgcttctgcatccaaaaaccaccgttttccaagaatgcgttgccgtcataatcgcgccacggcatatattttttctcaatgctgcgccacacaccgcggcgttccttcgccgtcatcttcgggttcttgtatacctcgtgctggaactcatccacgcacgccatgtacgggataacggccagtgcatcgcacaaatgtgcataacggtattcgtccgcgcggtcgccgaagaatttatccatccacgggtaggtgaaaaattccatcgacatcgagtggatctcgcacacctcgctcgtagagccctgcaaaacgccgatcggaatcaagcgctcgccgagatatgcctggaacgcatggccggcttcgtgcgtcaaaacgtccacgtctgcagaagtaccgttaaagttcgaaaaaatgaacggtgctttgtattccggcaaagatgtgcagtagccgccaaggtgcttgcccgggcgtgtctcaaggtcaaacagctcgtacttcgtcatgaagtcgaagaattcctttgtttcgggcgagagcgcgccatacatttcggtcgcctgccccaccatataatctttgccgccgatgggatctgcgttgccgcctgcaaatgtcaaactctcatcgtagtatttgacggaatccaaaccgaggcgctttgcctgcgccttgcgcatgcggtccaccgccggcgtgataaccgtgcggatctgctcgcggaatttctccacgtgctcgggcgtgtagtccagtctgcccatattgcggtacgcaagctcggtgtaattgtcatagccgagcttcttcgccatctccacgcgcacttcgatgagcttatcgtacaactcatcgagcttgtcggaaacgccctcgtaaaggttcgcccacttttcaaacgcttctttgcgctcctcgcggtcggtgctctccatatgttttaaaagaccgtagaaattgcaggtctcgccgcggaaatccaccttgcaggaagccgcagccttagaatactccacggaaagctccgattctttcacaagctccgggataatgcgctcgtcctgcgtcttgaggtcgttttccaaaaccgcgatgaaatgcgcgccgtattccttttcaaagtccgcacggaacgggccgttcacaatgtcttccttcatcgccttctccgccgggatcaggttcggcagattttcgttcaggtacgccatttccgcttcgtagaattcatctgtcgtgttcatcgtgttgcggatgctgcaaagcgacgcaatcgtagacaagtgcgtgtcgagcttttcagcgtctaaaaacacctttttcgcttcctcaaaggtctttgctgccttaaatgcctcgctgtaccgcttatattcctccactgccgccgcaatgtccggtcgggtgtacggaagttcactgaatttctgcacaacaatacgcttcctttccaaaatctatttgcgcttatcataccactgcttcgcacattttgcaagctgtttttgtttatcctgcacagcaaaatgtaatctatgcaaaaagagaccgcgcacaaagcccgatctcttcttttctttgagataaattttaagttatttcagttcgccaacaacctcacgaatggacttcgccagaatattgaggcccttttccaacgtatccatcggcaccttcagctccggcatgatcttcacaacggaatcgcggcggcctacacgctccacgatgaggccgttttcaaacgccttatgaatgactgccttcgcaacatcgccctcaaacgcgccgaaatccacgccccacagcaaaccgatgccgcgtgtcgtgatgcggctgtcaatcgtctcaatgttctccttgaggaacttctccacaaacggcgcacgctcacgaaccgcgtcttccacgtgctcgttcagcatgaactccaggcccgctttcgctgcgaccaaagacagctgatagccgcggaatgtgccgttgtgctcgcccggcttccactggtcaagctccgggcgcaacagcgtcagcgcaaacggcatgccgtagccgccgatggacttcgagagcgtcacaatgtccggcgtgatgcctgcgcgctcaaacgagaagaaccagccggtacgggaagcacccacctgcacgtcatcgacaatcatcaaaatgtcgtacttgtcgcacagtgcgcgcacgcgacgcagccactcatcgggcagcacataaatgccgccgtccgcctgcgtcgtttccaaaatgattgccgccggcttctccacgccggagtggtcgtccgtgatcaggcgttccatatacgctacggtgtcgagctccgggaacatatacggtgccggaatgtgcgtcacgttgtaaagcggcacgcctgcgcccttgcgggagtccgcattcgttgtcagcgctaaagaacccagcgtcatgccgtggaacgcacccatcagtgcaaagacattgttgcgcttctttaccttgcgagccagcttcaaggccgcttccaccgcgtttgtgccggtcgggcctacaaactgaattttatagtcaaagccgcgtgggcgaatgacttcattttcaaaatattctatgaactcgcgcttcggtttcgtgtacatgtcaagcgcgtgcatcacgccgtcgttttgcaaatagtcaacgaccttctctttgatgtacgggttgttatgcccgtagttcagtgcgccggagccgcaaaagaagtcgatatactccttgccgttctcatccgtctggatagagcccttcgccttgacaaagaccgtcgggaagttacggcagtaagagcgaacttcggattcatacgtttcaaatactttcgtgttgtttgtactcatgtagtaccatcctttctaccatgccatctgcatgattcagcgatcacacgcgttatgcgtggggctgcgtttttcccgctcatgagttttgaagcgagagtcagcggtcgttcggccaatgtgtaatagaaattttggccggatccatacggcacgcacaaatcgttttgtgcgataccgtgattaagtttaccacacttgtccgaaaaaagaaaggtcttctttcgcaaaaacacatatatctctgcaaaaattctgcaaaaaagagcagcgcccgcaaaagacgctgcccaaatttacaaaatttaaatttattcgatgttctcgccgagcgtaccctggctgagcgccttcagatacgcagtgatgaaatcatcaaggtcgccgtccatcaccgcgctgatgttgcccttttcgcagcccgtgcggtgatcctttacgagcgtgtacggcatgaagacataggagcgaatctggctgccccacgtgatctccttctgctcgcccttaatgtcggagattttttcaagatgttcacgttccttgatctcaacgagcttagagataagcattttcatagccacgtcgcggttctggtactggctgcgttccacctggcaggaaacgacaatgcccgtcggaatgtggatcaaacgcacggccgaagaggtcttgttgaccttctgtccgcccgcaccgctcgcacggtacacttccatcttaatatcgtccgggttgatttccacgctgaggtcctcgtcaatctccggcataacctccagagaggagaatgaagtgtggcggcggcctgcggaatcgaacggcgagacgcgtaccaaacggtgaacacccgcttcactcttcaaaaagccataagcattttcgccctcgacaaggatggaagcgctcttcaggcccgcttcgtcgccctcaaggtaatcgagcgtagaaaccttaaagccatgacgctcaccccaacggttgtacatacggaacagcatctcggcccagtcctgtgcctccgtgccgccggaacccgcatggaacgtcaaaatcgcgttcttactgtcatattcgccggtgagaagcgttgtcagacgcatcgtctcaatctctttgccgatggcctccacttcctcctgtgcctccggcaaaagagaaaggtcttcttcctcattgcccatttcaatgagcgtcagcgtatcttcgcagcgggaaacaaggttcaggtacgtctcgtccttctgttttaacgcagcagtcttctgcaaaatcttctgtgcagattccatgttgtcgtaaaagcccggctccgccgccttgttttccagcatctccacttcttcacgcagtctttcaaggcccagtgcgtccttcaattcatccagcgccgcctgcttttcattcagttcatgttttaatacttcatattgcagcatacgttttcgttacctttcaaaaatatccgtccaaacccgccttcaaacatttcacggcggcgttcagcttaaatgtgcgcaaatctctgtttattataatagataacccgccgtttgtaaatagaaaaaatgcgggaaaacgcacggtttcgctgaaatcttaatatttgcctttcttgaagttttacttcgttttctcactgaattattaacagtctgaaaatttgcgcgctttgcattgcgattgcgggcattttgtagtattatatgaataagaaaataattctggcagtattctgaccgtctttcgaatattgccaaccgaattttggaggttctgttttggactacaaaggcatcaagtgtcccgtgtgcgacaagccgtttacggaaaatgacgatatcgtcgtttgcccggtctgcggtgcaccgtaccacagaggctgctataaagaaaaaggtgcgtgcattttcacagatctgcacgaaagcggcaagacttgggcgccgcctgttccgccggacgcgccgaacacggccagtgagcttaaagacaaggaatgcccgaactgtggcaccttaaacgcccacagcgcgctgttctgcaacatctgcggcacttccctcaccggcgcgccggatgaacaccgcaacacgggctacaacacgcagcaaaatccgaataacgcgaacaatccgaacggctataacaattacaataacccgtacggcagttatcccccgccgcaaaacaacgcaaactatcagagccgcggctttggcggcgtgccgttcgcgttcgaccccatgggcggcgcaaatcccgcggaatttgttgcggataatgtcacctacggcgacgtgagcaaggtcgtgcagcagaatacggcgtattacctttccgtgttccgcaatattaagtctttcgggcgcagcaagttcaatttcagcgcgttcctgttctccggcggttggctcctgtatcgcaagcagtacaaggcgggcatcatcacaacgacaatcatgttccttttatatatcgcaaacctgatgctctcgtgtttcgtcgtcaaccccatcacgacgcacgttatcgataacgccggcgtgtcttcatcggatctcagctatgtgcagcttgcaaacctgctttcgcagtacttgatggataacccctcacagtatcttttgttctgcctgccgcttttgtgcagcgccctgatgctcggcattatgatcttcgtcggcgtgcgcgcaaaccgcatgtatttaaatcactgcgtccgcaccgtgcaggagattaaaagcgtcagcaatacggaaaccgacctttccgcagaatacaccgcacgcggcggcgtgaacgttgtcgtaacgttctgcctgctcgcctgctatatgatcctgcgttggatcccgctctttttgacttgattccagcttaaaagcgacatcaccgcttacggtttcacgcggtaatgtcgtttaaaataaaacacatttggaaaataggaagtatatttggaggtattgatttatgaaaaccgtcagaaaagccgtcatccccgcagcaggcctcggcacacgcgtgctcccggcatcgaaagcgatgcccaaggaaatgctgcccattgtggataagcccgctatccagtttattgtggaggaagcggtccgcgccggcattacggatattctcatcatcacaaaccgcggcaaatccatcatggaagatcatttcgaccgcgccccggagcttgaggagcgtctgctcgcaagcggcaaaaaagaagtgtacgatgaagttgtgaaccttgcgcaccttgcaaacatcacctacatccgccagaaagagacgcgaggtctcggccacgccatctcctgtgccaaagcatttgtcggcgatgagccatttgccgttctctacggcgatgacgtcatcctcggcgaagatcccgcctgtggccagctcatccgcgcttataacgagaccggcaagggtgtcgtcggcgtgaaagaggtcagcgaagaagccattcagcgctactcctccctcaaggtagagcctttgcacgataactggttcacctgcaccgatatgatcgaaaagccgagtaaggataagattatgtcgctttactccatcctcggccgctgcgtattgccgccgcagatttttgacattctcgcccacaccgcacccggcgccggcggcgaaattcagctcaccgatgccatgtgtgagcttgcccgcaccgaaagcatgatcgccgtcgatttcaccggcaagcgctacgatatgggcaataagctcggcgtcatgcaggcacaggtagaggtcgccttaaagcaccccgagattggcgaaagcttccgcgcctaccttaaagagcttgccaaaacactttaaatgtaaagttgattcacgttacacgtatgtaaagtccattcactttgtaaagtcagtcaactttacaaagtgcctatatcgaatttgattttccaaaaatccgccgagttccaagatttttcttgactttgcggatttttatgttataatacttttgttagtttgtgcttatgcgttttgtgtaacacaaatgacaatccttgctccgtttaaaagtacggggccaaagtccaaaaggaggtgcaaaccatgacagaggtagtaaagaacaagtacgagaccgttatcgttctctccgcaaagctcggtgaggaaggtaatgcagagctggtcgaaaagttcaaggcattgattgcaaagcacggcactgtcgagagcgttgacgagtggggtaagagaagactcgcgtatccgatcaacaaggaaaccgaaggctactacaccctcgtaaacttcgagagcacgccggacttcaccgctgagctggacagacgctataagatcactgacggcgttctccgttccatcatcgtgaagaaagatccccgttttgcaaccgctgctgcaaagccgcgtaaagccgctgagccgaagccgatcgacgttgaggctgtcgcagccgaggctgtcgaagcaaacgagtccgctgctgagtaagttttttaaaacgaaagagagttgttacctatgttgaatgttgcagttgttatgggcagactggttgccgatcctgagcttcgccacaccccgagcgatgttgccgttaccagcttcacgctggcggtagaccgctcctatgttaagtccggcacagaacgtcaggctgatttcattgatgttgtcgcttggcgcagcaccgcggattttgtatgcaaatacttccgcaagggccagatgatggcggttcacggttccattcagacacgcacatatacagataaggacggcaataagcgcaaggcgactgagattgttgcgaacgatgtcaattttgcggattccaaacgcagtgacagcggcgcaaattacggtgccccctccgccccgtcttacggcaataattacggaagtaacagcgcagccggaaatgaaatgcagcgcccggcttacagcgaacccgctcccacctattcaagtggtaacagcggagatttcgaggagatcatcggggacgacgacctgccgttctgatgatctaacaacgactaagataaggaggctttcgcaatggcagacagaccggagagagataatcgccgcggtggtcgcaagggccgcagaaaagtatgcagcttctgcgttgacaaagcggattacatcgattacaaggatgttgccaagcttcgccgttttatttctgaaagaggcaagatcctccccagaagagttacgggaacttgtgcacatcatcagcgtggcctgacagtcgctatcaagcgtgctcgtcacctcgctctcctgcccttcagcagcgactgatcgtgcagatctaatatcagcgtacaagggagattttcgtcggaaggtctcccttttgctatcccccattgatttgcaaaacccgcactctgtgcctttaacggtacagaatgcgggtttcttttaatttacttgaaccgtcatcagaacagacgaatgatcttgccgccgcagccgcaatggtaccgctccggatgctgcaccactgccgtgagtttcatgcgcggaaactgccttttgcattttgtacattgcagcatatatttcaccggtttctcctcgtactccacaagtgcttccttcgtcgttgccgtaatgcagtagctatacgcgttgttcatcttacctgcgtatgtcttccaaaggagcttgtgattcatgcagcgcgggcacgtgtgcaaaagctcatgcgccaaaacactgcgcacacaattctcgtccttgtcctccaaatacgctgagacctcgattcgatattcatatttttcgccatgtaatcgcatacagcgaccgtagcgtttttttgcgcgcgtgttgatctgcacctccggctcgatgttgcccgagaccgggatatccagcgcacgcacttcttcgtagatttctttcatcaatgcgttataatcatacttcataaagtttcctcgcttttctttattttactactatctactacgaaagaaaagtggtataatttaaaaggaaaatcgttttcctatcaatttttcggaggaattttcatgaagtattattcgatcggctacgccgtcaacgacggtttgccggaagttacacgcgaagatgtacagaagctcacccacatgaaccttgcgttcggtctcatcagcgaaaacggccttttggatctgcaccagatgacacatctcgatctcatcccgcagttccgcgattggaaccccgctctgcgcgtagtgctttccgtcggtggctggggcgcgggcggcttctccctcatgtcccgtaccgaagaaggccgccgcgcatttgcggagtcttgccgcaaagccgtggaggagtatcacctcgatggcatcgatatcgactgggaatacccgtgcagcgaccaagctgagattgactgtgactcgagcgataaacagaactacacaaagctcctgcaagctctgcgcgacgcccttggcatgaaccgcatcgtctccaccgctgtcggcgcaggtgattatttcccggaaaacaccgaaatggacaaggtcgccgagattgtcgattacgtgcagctcatgacctacgacatgcgcaacggcttcacgcatcaggccggccaccacgcctccctcagtgcaagccgcggcgatacgagcaatacgaatacgcgctacatcgtcgagctgttccacaacgccggtgtgccgtacaataagctcgtcgtcggcgcagcattctactgccgccattacacgggcgccgcaaacgtcaacaacggcctcctgcaggaagccagcgccggtatgtacggcccgaactacgacggtctcaccgaggagttccgccgcgagcataactacacggaatattgggacgaggacgctgaagccgcatatctctggaacggcgaaacattcatcagcttcgagtcccccgaggctatccgccgcaagtgcgagttcgtcaaggaaaagggcatgctcggcgtcatgtactgggagcacagcgccgaccacacccgtgagctgctcactgtcatcgcaaaaacactgaatatctaaattctaacggaaaaggagcctgcgcgcatgaaaaccgcgttcaggctccctttttaccgataaaaacaagaactatccctgtttttgtaaaataaaagacccatcggaaattccgataggtcttttggcgtggcaggggcagaaggattcgaaccctcggcacgtggttttggagtggatgtggaaaaagcattaacggacatacaacagccggttttccgcgccccttattttaaaggtagccaccaggtttttcagcatctccgcctggccggacagctcttcgctagctgcggcgctgcgctgggcgttatccgcgttgctgtccaccacgcttgagatctgctctatgccataggcaatctctgcagcgccctccgcctggcggctggtgttttcagcaatactatcgatgagcccactcatctcgtcagcatgggtaaccactgctaacatggactccgaagtctcctgcgcggccctggtcccctcatctatagagccaacggtttcacccagcaggaccgttgtttcccgggcagcctccgcagaccggctggcaagagaacgcacctcttccgctaccacggcaaagcccttgtcggcttcaccggccctggctgcctctagggagccatccgtcagggccacacgtacagcccggcggggtaggcttcgttctggtccactgtgtgcttgatgtatgcctccatctccgggatgtccatatctccgtattcgatggtatcccgctgtgtttccagcattgtaagggtcctgttcatccacgcgctggtctcttggatagtcttacctgtagtggtttgaagcagctcttcactttttatcaagagtgcgtcagacactctggaatagactactacaagcagcgccgacactgttaggacaacactaataacaattgccgaaacaagcttagccgttatccccttggccttgctgaccttttttcgcaactcgattttcttgcatacccttattctctcctatctttcccgcagactgctgggacaaaaatcaccttgccatattcaattttgtgtatacactttttgtggaaaaaatcaactgcttttcgggcaccgtgataaagaaagcgtgagcagcaagctatagcataaaaccgcagcagtggagaagttatcaaaaaagcaggcagcgcttttcacgccgcctgctcgaagcaagatcacttttgcgtttccccgacgaacaccctgtcccggaagcacacgttccggtcgctggtggcgccaaagagctggaacatccctttcaccccgtcggtgacccacaggaagagcttctccccatcgaattggaatttccaggtctggtaatggcccgtttcccgccagcagactgtgagtagcagggtatcctggtccacccaggtgtggtgggcagagtaggaccaggcccgagagcgctgttccggcccccgcagggggctgttgctggggatctcaatggcaaaggtcgtctccccgtgccgatccgttacgcaggagctctccagagactggatgccgtccacggcaatggccagccggctgtttgccagctgcagccggagctggtgctgctcctgactgtctactgattttaagaggtatgtcttgtcctgcagcaaggcctgcaaataggaggagcttggctcatacacagcaggggcttcccattggcagagtaccttttgcaaatgctcataggcccaagcatcccgccccttttggggatctgtcaagttcgcaagcaggtattgttccaccagagggaagacccgagtgccgtcgatttcttccgctgtggtgacgatgaccatgtccttttgtggaaacaccataatatactgaccaaaagcgccgtccgcccggtagctgccggagttgttttcccagatctgatagccgtaccgctggccccagccggcgcagccctgtcccagggtggggacgtggggagcggtggcctcatcaatccactcctccgaaaggagccgctggccattccataggcccttgttcaggtagagcacgcccaccttgcacagatccctgggggcgataagcaatccccaagcaccggtgtttactttgccgttgacgtcccagcacacgtcggtgattcccaggggttcaaagagcttctcctgcaaccactgaaacaggctcttacccgttgtccggctgatgacctccgagagcatataggtgccgccggagttgtacacaaaatgttcccccggcgcgtaagccattttccgggtgaagaagatttccggccaaggggtgccctcgctgttgcacatatcccctacggtgtcccgttcatggccggtactcatggtcagcacgtcccgcagggtgatctcccttgctcgggggtccatgtctaggtctttgcattccgggaaatagtccagcagcgggtcgttcacattcacaagaccctcctgcacggcgaatccaatggctgtggaggtgaaggtcttgctcaccgagtacaccagccgcttatcgctggcccggaagggatagcgggcggcatccaccacggctttcccgtggcggatgatgtggagcgtgcgcagcttgtagtgggccttgtcgcactcctgcaggaagttcgcgacgtcgatagaggaaatgcccacgtcctccggtaagtagaaacggtcgaataagtctgccaagttattccgccccttcctttctcatgttggccacctctttgtcggcatccatccggctgctgaacagcaccagcaaaatactgcacaccagggggattacggcgtagcccacagtctccatcacccgggtgaaggaggactgggccaggcctgcgttggccgcttcgccgctgtagccgccaatggccagcacagccgccacgcccacgctgcccaggagcattccaaaccgcatgccgaattgggcgatgctggtggaaaggccggagaggtcggttttgttttttaagttgatgtagtcagccacatcggcggtagcggtacccagcagcacaccaaagaaagcgctgccaatgccgtacaccgcattgccaatcaaaacgaagaccaagttggggacgatcatcaaggcgtagcccaccacctggaacaaggaacccagtacaagcacctttcgcttgcccagcttggcattggcaataggtacaatgccaaacaggcagcagaggataccaggcaccagctttgcatagctgatctgggtcatgtagccggcatcgcccagtacatcacgcaggaagtagatggccatagagccgaaaatcataccggcaaagttgtaagtgaggaacataccaaacagcgggagggcgtatttgcagccaaagacatacttcagctgggttttgacgggcagagaggggcgcttccgggccgcgctgagctgctgagcggcttcggcccacacctccggggtctcccggcagataatgccggtgaggaagggcaggataaagccaatggagcagaaaatcaggctcagaccgaagtagcctttttcatagccgccaaaatacataagcaccggcacgccgtaggcactaacgatcaagttggagatctgtcccaaaaggccgcccaagttagtgacctttgctcgttccacagagttggaagttatcttgatgagcagggtggcggtggcgacactgataacggcgccgaacacagctacatggagcaggtagtttacaaacacccagatcatccgcccggtggggctgaagctggtaggggtgttaaagatcaggaacacgggcagggccacaaaaaaagcggtgcccaggatccaggggcgggccttacctatcttggtgtgagtcatgtcaatgaggaagccgctcaggccttctgtaacggcgttgatgatccgggcagcggtcatcatggcggtgatgaagcccatggaaagcagcaggttgtccgtcaaatagatggtgaggaagccgcccataatgccggcaatgcagctggatccgcagccgttgagggcaaagccgatcatttgcgacacagggagcttatcttgtttcttttctgtcattttttcaatcctccaagtcgaagaaatgcggcaggcggtgcgcgcactccgcttgcagctatactattagaataccacggggagagttgagaaaatatggcggaattgactgctctttagggagaaattgactaatcttgccgaaaaaatggattttgggtaatttcttttcgataatttctaggggtacagccatagtattttcggaaacattggataaagctgccttcatcggcaaagcccgtttccagggcgatttccgagatttttttggatgtctgagcgagcagctgctctgcctgaagaacccggtatttggctaggtattgggagaaagtggctcccgtatactttttgaaaaagcggcagaaatactctttcgagaagaaaaactgctgcgccatctgggcggtgttcaggggctcgctgtaatggtcatgaatgtaagtcaggatcccctccagctttcgaaagggctcctgagaggtgctgtctttggcccggtcccgttcctggcagcactgggtgagcaggacatagacaatctcgcagatctgccggaggacaagcactgacaggaagggagtaccctcctgctcataccactcgttaagcgcaaggatcagggattgaattttcgtattagcctcctctgtgaggacgaaatagcatgtatcgaaattggggatcaggctttttaagaaggagtagctgatttgcagcgtgatgccggtgatggcaaagccgtctgtggcgaaataggggatggaggagtggacctcccggctattgaccagcacaatgtgctgaggtgtcacatcttccacccggccgttgataaaaaagcgcgaggagccttcaaaagctgtattgatctccaattccggatgccaatggcttttgacaatttggcttcccggcctggtgtgccggatgatgaagcccgggacagctccgtatatctccactttttcaaaaatgccgtggtcgggcatgggaatcagctccttcctgtgtttgttaattataccggaatccgtcgaatatagtaccctttttctttaccgacccagttccacatgacctcgtaaccaagctcattgagaacagcgatatcttttgtcagcgtcctgcgctcacacgaaatgcccatatctccaagcttgttgcaaatctgacttgtggagaggggattctgctcatccgtctcttgacgaagaagctcaaggagcttcagcagcttatatttcagccagttttcctgtgccatttgccatctccaagggtattccttcaaaaaggtataaactattattaaacattatagcacaaatcccgtcgatttacaaggttttgctgtcacttttccgcgacatctctgtgctttcccgaattcaaatcccgtcgggtgctgttttgccaacttctttgctgcgcaaagaaacgcgaaaagtaacacgccaatttcactgcctaaaagcaaaaaacaggggctggcgcggcctcaatgaccgttccaacccttgtttcagcggtattttcctatattgagggctattttgcctcgaaaagcatgaaaaaacctctctagtcttggtagacaaaagaggtttctttcgtggtgcgcgagacgggacttgaacccgtacgtcataaacacacgcccctcaaacgtgcctgtctgccaattccagcactcgcgctcaacaatatgtattatagcacaagccatgctgtttgtcaactgttatttctcaaaacgcaaaaacatgtccgttttttgcattttaccgcaaaatgctggtgaaaaaggtcaaaacatgctatactgcatataacaggaacatgggaggaaaacacgatgacgtacacaaaacactatacgtcgccgcttggcatgatcttgcttgcggcagatgacgcggggcttacagggctgtggtttgaaggcagcaagtattttgcggcagagctgccgaaggagcacacagaacaggacacacccgttttgctcgaaaccacacagtggctcgacgtatattttgccggaaaagaaccggatttcacgccactgctgcacctcgtcggctcggattttcggcaggcggtttggaacatcctgctctctatcccctacggccggacgatgacctacggccagattgcaaagcagcttgcaaaaaacaccgggatagacaaaatgtccgcacaggcggttggcggtgcggtcgggcacaatccaatctcaatcatcgtcccctgccaccgcgttgtgggcgcaagcggcagcctgaccggctacgccggcggccttgataagaaaatcgcgctgttggagctcgaaaaaaccgacaccgcaagatttttccgcccgaaaaagggtacggcgctgtaacacgcccttacactagaataaacgaaaagatcctccgttattgaacagcaccccatttgttagacagtatgatataatgtctaacaggtggggtgattttaatgccaaagggagtaccaaacaaacgatacacgccggaattcaagaagctggtcgtggaaaccatgatgaaagaaaagatgagttacagagaaacggctcgacaatttgaaatcagcaatcatcacagagtacaagactgggaacgaatctatctgacggagggtccagaaggttttgccatcgaacggcgtggccgcggcagtaagagccgtccgccaaagccgttgccgaagcaggtagaagaagatctgctggccgaagtgcagcgactgcgtgcggagaacgattacctaaaaaacttgcaagccttggttttggaagacgagcgacgccggcacaaaaaacgcaggtagttcaaaagctaaggcaaaaacacgcactcagtattctgctctcaatcgctcaactgccccgtgccactttctactatcatttgaagcggataaacagtgtagataagtataaagctgtcaaagcggagatcacggccatctaccatgaaaacaaaggaagatacggctatcgccgcattacaacagaacttcacaagcgcaatttcctcctgaaccacaagactgtccagcggctgatgaaggagctgggcttggtttgccgtgtcaggatgaagaagtatcgctcttataagggagaagtgggcaaaatcgcaccaaatctgctaaatcgggatttccatgccgaaaagccgaatcagaaatgggtcacggatgtgacagagttcagtttgttcggagaaaagctctatctgtccccgattctcgatctgtgcagcagcgatctggtcagctataccatctctgcgcatcctgttctgagtatggttacgattatgctggataaggcttttgagaagataccggatggaaccgggttgatccttcattctgaccagggctggcagtaccaacagatgctccgggagaaaggtgttcgccagagcatgagccgcaagggaaactgtctggacaatgctgtgatagaaaatttcttcgagctgctcaaaagtgagctgctgtatttgcaggagtttcgctccatggaacacttcaaactggaactgatcgaatatctggattactacaacaactgcaggatcaaggcaaagctaaagggcttgccgcctgcaattcacagacagcaagccctttcggctgcttgaacaattcttacttcaaaatattgtctaactttttggggtcacttcatatgcctgcgggagatctttttgctataaaaaccaagctaaatgtaaaataaaagacctatcggaattcccgataggtcttttggcgtggtgcgcgagacgggacttgaacccgtacgtcataaacacacgcccctcaaacgtgcctgtctgccaattccagcactcgcgctcaacaagtgatattatagcaacaaacaggcaaattgtcaagactattttaaaagaaacttgaatttttgtaaaaaaccggatttgcgtcggtttaatcctcaacgatgatggcgttttcttctttgacttcttccgcaagcagcatgcgcacggggtgctcggcagtatacggttgccatgtgggcaagccctccccattcgggtcgccagtctttgcgaagtttgcccagtaggaggacattgcagcttcaagcgtatagtcgcacggttcccacgggcgccagcatctgttcatcgtgtggaaaacataccacaactcggacgaatggaacgcacctgcgttgtcgcccggcaactgacggttgaagaaatagatgtagctcgggcatctgccgagtttattctggttcttcgcccagcgcacggcgctcttttcgagaattctctcgcccgctgcgatgtcgccgccggtgcagccgatcatgtaatcgatgtcgtgcgcattgccggaaagcgccacttcgtctacggaagccttcagcagcacgttatcaacaacgggctgccacgcaagaccgcttggggactggatggtatactgcacctcagcaatcttttctgccgggacagcgcgcatctcttcgatgtttttcgcgccgagcttttccatcagctctttggaggacttcacgcgcatttcaacggaaacatcgtgcgaaaggccgccgaggccgcctgcgctctgcaaaacagcgcgcttaatcttgccgcgcgtcaaatcggacgaaataagcgtctgcacgctcatgcagcctgcagactggcccgctgccgtgatgcagtccgggtcgccaccgaacgctgcaatattctcgtatacccagtcgatcgctgcaacttgatcgtaaataccgtagttgccgctgatgccctcgggattttcggcatcgagctccggatgcacaaagaagccgagtgcgccgacacggtagttgatggagacgaacaccacgccgtttttcgcaaactgctcgccgtcgaactccttttccgcgccgctgccatgcgtgaacgcaccgccgtgaatccagaagaacacgggcaacttatcgcccggctgcgcagatgcaggcgtccagatgttcagatacaggcagtcttcgctctgctttaggttttcatcactgtaaaattccttgccgtagagatccattttggacagatcagtctgcggtgctttggcggagaactccagtgcggggcgcacaccctcccactttgcgtgcggctgcggacgcttccagcgcagctcgccgaccggcggtgcagcatacggcacgcccttgaagatcacgctttgtttatcatcggaaaacgcaccttcgagtgcgccttctttgacggttacgatcgtattcattgaaacttcctcccagggataaaattcacggcaacgccgcggataaatttttgcggtgctgtcggtggtttataaatttaatttatgcgttaagctgcttcaggagcatctcacctgcgccggcgggcacactgtcgccgccaaacgataacagcgcacgcagcggcatttccgccatcatacgtgccatggcctcgcccatgccgatgtcgtccgcatctgcctgtgcaagcgggttctgtgccatcatcttgccgagaatctcgcggccgacgggactttccataatctcttcaatcgtggaattcattgtgtagacgcgcttaatctgcgtagtagaggtgacgttcaccgtcgcggtgcaggcgatgtcgcggctggattttgccgccataatcgtgtagtcgccggactcaacgtaccaatcggaaatatcggtgcggtagtacgcgaacgcacgctttgcgagcgtaaaggtgacggtcttctcctcgcccggctcaagctcgaccttttcaaagccgcgcagctcttttatgggacgaatggtgtggctttccggcatgccgacgtacagctgcacgacctctttgcccttcaccttgccggtgttgcggacgttgacggagacggtcagcgtatcggtatccttcatcttggacttatcaagcgttaaattgctatattcaaacgtcgtatagctgaggccgtagccgaacgggaacaacacgtccatgttctttttgtcgtagtagcggtaaccgacaaatacgccctcgcgatactcggtcttattctgctcatcaccgaagaaatagaggtacgaggggttatcctccagacggcgtgggaacgtttccgcgagtttgccggaagggttcacatcgccgaacagcaggtcgagcgtcgcggtgccgacggcttcaccgccgaggtatgcgtacagcacgccgcgcacgtcatcaatccacggcatggtgatgcagccgccgcacatgacgacgacaacggtgttcttctgcacctcggaaacagctttgacgagtgcttcgtggtttttcggcatcgaaagcgtgcggcgatccatgccctcggactccatggcgtccgtgatgccgacgaacacaacggcaacatcggcgttctttgcagcctcctgtgcttccttgaggagcgcttcgtcggactctgtggtgttcgtatcgtagccgggcgcgtaggtgacatcgagtccctttgcagcctcgagcgcgcttgtaaccttataggagttcacatgcgagctgccgccgccctgaaaacgcggagtctccgcaaacttaccgatgaacgcgagtttctgactgcgctttaatggcagaatgccatcatttttgagcagaaccatggactcatctgcaatcttgcgcgcttcttcgtggtcggcttcaaaatcgatcttcgtttcggactgcttattttcggtgtatttgagaacgatgttcaaaatgcgctccacggcggtatcgagcaccttgatatcgagcgtaccgttgttgaccgcgtcaacgatctgcttgtcgtttgcggcgtttttgccgggcatttcaagctccatgccggcttcaaggcactttacgcggtctgcggtggtcgcgccccagtcgctcatcacgtagccgtcaaagccccactcgtcgcggagaatatcggtcagcaagcgcttgttttcagcggcgaatgtaccgttgatgcggttatacgagcacataatcgtccacgggttcgagtcctttacggcagtctcaaacgcagaaaggtaaatttcgcgcagggtgcgttcatcaacgacgctgtcgctggacatgcggttgtattcctgactgttggcggcgaaatgcttcacgctgacgccgacattctggctctgcacgccgtttatgtagtttttggcaagctcgccggtgaggtacgggtcttcggaaagatactcaaaattgcggccaccgagcggagaacgcttgatgttgatggccgggccgagcagaacggaaaggtcatccgcctggcaggcgtggccaagcacttcaccggagcggcggaacagctcgcggtcgaatgagcacgccatgcaggagcctgtggggtagctggtggcgggcacgctggcgttgaggccgaggtgatcggcggcgtcagactgcttacggatgccgcacgggccgtccgagaccatgacggattcaatgccgaggcgctgcggagtatcgagatgccagaagtctttaccggagcaaagcgcggctttctcttccagtgtcatttgagaaatgatcgatttcacatccatacaaacaactcctatgactgatttgagttcagtatagcacactttcgcgaaaatttccatagataattcagaaattttgttgactttattggtagaaagatattataaaagccgatacgattacatcggcttttcatcacaatttgaatagtttttcaaaattatcataaagcattttccggttctcttcctccccgtagccgagtgcgaaaaagcgttcaagctcctttttgtgcgtccacatggggaaatccgtgccgaacatgactttatccataccgaaatgttcaatgctccttcttgcttcgtccgggttcaacacaaacagcgagctgctggtatcgacccacacgttcgcgccttttaggcacgctttggcttcatcccagcgctggtaaccgccgagatgcgcggcgatgcactttaattccggcagcttttcgagcacatttgcaagcttcttcggcgcagagagctcgcttctggcgtcacccatgtgaaataaaatcggcaaatcgcgcgccatgcaggctttgtagaccggcagcattttttcgtcatcgatggcaaagccttgaaaatccgagtgcagcttgatgccgtgcaggccgagcgcctgaatttcattgagctctttttcgacgtcctcaatgtcccggtgccatgcgccaaggccgacgaacttcgggtatttttcgcatttggccgcgatgaaacgattgatggagccaacctgctccacttttgtcgcaacggagcagacgagaaatttatcgaatcctacggcggtgccctcttcgtttaaaacgtgcggcaggccgacctccgccatgggaagatcataaaaacggccaacgttttcggtcgccttttccgctatcttgccgggataaatgtgggcgtgcgcgtcggcggcacggtacaaaacgccgttatgcttcaccatgcgccttcgcctccctttcttttttcgagaacacacagccacagaaatcctgccgatataggttatagtctgccgaaagctgaatggagcgcttatagccctcctgttttttgaaatcggacggcaagtgcggcacgccgtattcttctgcaagcgcttcgccgatctcatttagcttctgcgcgtttttcagcgggctgatggacagcgttgtcgtgaaaaaatcaaaatgatgctctgcggcatactttgccgctgcttccatacgcagcttgtagcacgcaaaacagcgctcgccgccctccgggatgtgctcaagcccgcgcacggcggtgaagaattcttccggcacgtaaggcagatcaacaagcgctacttccttggtgcatggcatttcggagataagccgctttaactctgcttcccttttttgatactccgcctccggataaatattgggattataaaacagcacggtaattttaaaatgtgctgtaagcttctccaaaacggcgctggagcacggcgcacagcacgcgtgcaagagcaaagtcggccgcttttcctcgtgcgtaaaggtttcgatgagtgtattcagttcttttgcgtagtttcttttattagccatgactttattttatcaccgaagccccgttttcgcaagatatgtatactctttatcacaaatttcttacaaatccgccgtgtgaattgacaatattgccgtttcgcggtaaactatatgtatcaaattgtgctcatacggcgcatttcggtgtttgtgtgccgttttacagaaaggtttcgtgacatgtttgatttttctatattgatttccaacccgctcatcaacgtcgctgttgtttcgtggtgtgcggcacaaatcttaaagaccagcatccatctttttaaacacggcgaatttaagaaagagcgtctctccggcgcaggcggcatgccaagctcccactcggcggtaacgtgctcggtgctgctgacctcttaccttatctacggcttttcctccccgatcttcgccatggcgttcgtgctggcactcatcgtcatgtacgacgcgaccggcgtgcgctgggcggcgggtctgcacgcaaaagccatcaactacattgtggaatatttaggcgatgagaacaccaaggacaaagaccaactgaaagaaatgatcccgaagctgaacgaatcgcttggccatcgcatgatcgaggtggtgtgcggcgcgctgctcggatttgcgatctcgctcatcgggtacttctgcttctaaaattcaatttgcatgaaaaaacgttgcacggagcttagccatgggctaataaggcagtatttaaggaattatggtgtaatcccgataaagggggggttacaccttttctttatttaagcggatttttccgcttttttctgttttactctttccattgtattaataagctgctgctctgttgggatgtcaaataacccgactgccgtaaaaaaatatccactttaacattattgtgagaatgtttcttctcatcgttgtaaagttcaatacgctcaataagtttgtttacaacggtcggagtaagctgtttcatctctgtaaattccataagcccttgatagagcatcttcatatcaacagtttgcttttgaagttcaatgagagctttttcattttcctcaacctctgatataagtcgcttttgctcagcttcgtattcatttgccatacgggaataacgctcatcggataacttaccgagagtattatcctcataaattcttgagaatttggaataatctgataatcatcttgacatttctcaattttcttatgcactttgtaactgactgttgtactcttaccgtttacggtacagccggtatattgtctgttttcaagaatgtgagcaacacttttggaactccaaccataaatattgagcggtataggattacttgttttcttgcctacggaattgaaatatgctgtcggtgtaagcactttttcggcttcaagctgtctggcaatttgtgacggacctttacccgaaatgcaaagattaaatatctttcttacaatttcagccgcaggctcatctatgtaccattgctccttgttaccttcgattttcttgtaaccgtaaggcactgttgaagaaatcctcataccctttgaggctttcatttcattaacggcacggattttctttgaagtttgtgcagcataccattcgttaaaaatgttatgaaacggcatcatttccgttcccacaccttctgtggtatcaacgttttcttgtatggctatgaaatttacacccaaagtcggataaacaatttctgtgtagtgaccgcaaagcaaatgctctctgccgaaacgagataagtcttttacaattacggttgacaccttacctcctccaataaggctttccatttcctgaaaaccgggacggttaaataatgaggtgtgatagcgatagcggcaaaaagctaataaaatcaatggttttgcggacagcggatagacagggaatgtgttaaaaactgaatacgcacacaagcggcgttaccttaaccccttttggggagaaagtaacgccgtttttttatgcccgcaggaaaggaggcgcagccggaatgtatttcacaaagggcaagcagcgggcgtttgaattgctcatgcagcagaagccgggatttgaccgctatcaatccggttgtgccggagatgatgaagattgcggcacttgccgtttctaccgccccgggtggaaatatgagttttgcgttttcaaagagtgtccctattgccccggcaaaaggacgcggaaaacgcacgccagcatggacaaatagacgggcaaaagcccttgtgccatgcggctttgcagacgcgaaaacggcaaagggcatattgcaataccaaaacagccgaaaacggctttctaattgtccacgcataccaagagaggaagtgaggaaatatggcagttttcagagtggagcgaaatacgggatataccgttatgagcaaccaccacttgcgaaacaaggaattgtccttaaaggcaaagggcttgttgtcgcaaatgctttcgctgcccgaagattgggattatacccttgcgggcttatcccatatcaaccgggagaagatcgacgcaatccgcgaagcggtaaaggaactcgaaaaagccggatatatcgtgcgcagccgggagcgcgacgaaaagggacgcttgcggggcgcagattacgtcatatacgagcagccgcagccgcgagagccggaagcagctaccagcggcggacagccgcctatattggatttacctacattggaaaatccaacattggataatccaacgttggaaaaacctacgcaggaaaaacctacgttggaaaatccaacgcaattaaataaagatatattaagtaaagaacaatcaattactgatttatcaagtaccgattccattcctttccattccctaaaccccttgccctttgcgcatggcgaagcggctacgccgccggaaaggaaaagaacggaagcgaaaagcaatagcgcagtagagatttacagggagattatcaaggacaatatcgaatacgaccatctcattcaaaactgcaaaattgacaaagaccgtttggacgagattgttgaccttatgctggaaaccgtctgcacagcccgaaagacaatccgtattgccggggacgactaccccgccgaattggtgaaatccaagtttttgaagctgaacagcagccatattgagtttgttttggattgcatgagggagaacacaaccaaagtgcgcaacatcaagcagtatctaaaagcggtgctgttcaacgcgccgagtaccattgacagctactataccgcccttgtcaatcacgacttatacggcggcgaatgagcatagccgcactttaccgggaaaggagttgataccttgcaggaggaagtaacccaaaaaacgattgccctatacgtcaaagtgggaaaaggcgcggcgcggcttaccgaacaggcgttacagaaagcaatccaaaagtttttggagcagaaaagcaaacccgcgcatgggaaacagaccatgcggcagcttatgaagcagaacgcgggtgtttccaacatcgagatcaccgacagcaatattaaagcctttgagagtacggcgaagaaatacaacatagatttttcgctaaaaaaggttaagggcgagcagacccgttaccttgtgtttttcaaaggccgggacgcggacgttatgaccgcagcgtttcaagagttttccgcaaagaagctgaaccgggagaaaaagccctctatccgcaaagcccttgccgctgcaaaggacaaggcgaagcagcttaacgccgcccgcgacaaggtaaagaaaatggacagggggcgcgagatatgaagcagatcaactacaaaaagctgatacttccgaatatcccctatgtgttctttgtctatctctttgataaagtcggacaggcggtgcggcttgcccccggcgcggatatttctgcaaagatactgaatatcacacaaggattttccgcagcctttgaaaacgccttgccgagcgtttacccgttggatttgcttgtcggcattgtcggtgcggtgattatccgcttgatagtctatgtcaaagggaaaaacgcgaagaaataccgcaagggcgcggagtacggctctgcccgatggggaaacgccgaagatataaagccctacatagacccggatttccaaaacaacatcattttgacgcagacggaacggcttaccatgaacagccgcccgaagcagccgaagtacgcgagaaataagaacgtcgtcgtgatcggcggcagcggcagcggaaaaacaagattttttgtcaaacctaatctaatgcagcttcattcctcttacgtcttaaccgacccgaaaggtacggttttgattgagtgcgggaagctgctgcaacgggcgggctaccgcattaaggtactgaatacgattaacttcaaaaaatctatgcactacaacccctttgtgtatatccgcagcgagaaagatattttgaagctggtaaatacgttgatagcgaataccaaaggtgagggagaaaaaagcgcggaggatttttgggtaaaggcagaacggcttttgtattgcgcgttggtgggctacatctggtacgaagcccccgccgaggaaatgaactttattaccctgttggaacttatcaccgccagcgaagcccgcgaggacgacgaggaatatcaaagccccgtcgatttgctgtttgccgacttggaagaacgcgaccccgaccatttcgcggtgaagcagtaccgaaaatataaattggcggcgggcaaaaccgcaaaatcaatcctcatttcttgcggtgcgaggctcgctccttttgatataaaggaattgcgcgatcttatgtcctacgacgaattagaacttgacacgttaggcgacagaaaaacagctttgtttttgattatgagcgatacggacagcacgtttaattttgttatcgctatgctgcaatcgcagttatttaatctcttgtgcgacaaggccgacgacgaatacggcggcaagctgccggttcatgttcgctgcctgttagacgagtttgcaaacattggacaaatcccgcagtttgaaaaattgattgccacaatccgcagccgggaaatctcggcttctatcattctgcaatcgcagagccagctaaaagccatttacaaggacgcggcagaaatcatacttgacaatgccgacagcaccttgtttttgggagggcgcgggaaaaatgcaaaggatatttcggagaacttgggacgtgaaacaatcgacagtttcaacacttccgaaaatcgcggcacgcaggtttctcatggcctcaattatcagaaattgggaaaggagttgatgacacaggacgaaatcgcagttatggacggaggaaaatgtattttgcagttgcgcggcgtgcgcccctttttcagcgataagtacgatataacgcagcacccgaactacaaatacctttccgacttcgacaagaaaaacgcttttgacgttgaacggtatatgtccacccgtccggcaatcgtaaagcccgacgaaccctttgacatatacgaaatagatttgtccgacgaggacgcagccgccgaataaaaacggcggcatttttatttccaacaacattttttgagccgttttagcggcagaaagcgaggtttatatggattttttcaacagcgcagttgacgtattgcagactttggtaatcgcgcttggcgcaggacttggcatttggggcggcattaacctcatggaggggtacggcaacgataaccccggcgcgaagtcgcagggcatgaaacagttgatggcgggcggcggcgttgcccttatcggccttacccttgtcccgctgctctccggcctgtttggataatgccacaaactaacactacccgccgcgctctcccgcttcacgcgggagggcgcgggaaaggagggattagcttttgatatggcagatgattgaagattggtttcgcggcattttgacagacggaatactctctaatctctccgggctgttcgacagcgtaaatacagaggttggagaaatcgcaacgcaagtcggcacaacccccgccgggtggaacgcgggcatattcaatatgatacgcagcctatcggaaaacgtcattgtgccgattgcgggcgttatcattacctttgtcatgtgctacgaactaatccagcttgtaattgagaaaaacaatctgcacgatctcgacacttggattttcttcaagtggattttcaaaacctttgttgcggtgctgctggtaacaaatacttggaacatcgtcatgggcgtatttgacattacacagagcgtcgtcaacgacagcgcgggcgttatcatatccgacacaagcatagatattgcaaccgttatcaccgatatagaagcaaagctggacgctatgagcgtcggcgggcttttggggctatggtttcaatcactctttgtggggcttaccatgaaagcgttgtctatctgtatcatgctggtggtgtacgggcgcatgattgaaatataccttgtaacgagtatcgcccctatccccgttgcgacaatggtaaatcgtgaatggggcggcatgggacagaactacttaaaatccttgcttgccctcggttttcaggcttttctaattcttgtgtgcgtcggtatttatgcggttttgatacagacaatcgcagcaaccgatgacatatccggcgcgatctggtcttgcatgggctataccgtcctcttgtgttttacgcttttcaaaacgggaagccttgcaaaatccgtattcagcgcgcattaagggggtgcagatgaagaaatacaaaatcatttacgccgatcccccttggagatacgcgagaagcaaggtacagggcgcagcggaaaagcactatcccactatgagtattgaggaactttgcgctttacccgtcaaagaaattgcggataaggactgtattttattcctatgggcgacgttcccgcagcttaaagaagcgttgcagttaatcaaggcttggggatttacctataaatccgttgcctttgtatggttaaagcaaaatcggaaatcgcccacttggttttatggcttgggcttttggacgcgaggaaatgcggaaatctgcttgcttgctaccaaaggacacccgaagcgacaatcaaacaaggtacatcaatttattatttcccctgttgagcagcacagcaaaaagccggatataacgcgggaaaagatacttgcccttatgggcgacctaccgcgtattgaactgtttgcaaggcagcatacccctggttgggacgtatggggaaatgaaatcaaaagcgacatacggtttgccggaaaggaggtttgaaatggcgtatgtaaccgtcccaaaggatttaaccaaaatcaagagcaaggtaatgttcaaccttaccaaaagacaattactctgtttcggcgcggcggtggctatcgggctaccgctattctttttgacaaaggacagcgcgggaacgacaacggcggctttgtgcatggtgcttgccatgctgcccatgttcctactcgctatgtacgagaagaacgggcaaccgctggaagtgattatacggcaatttgtggaagtgaagtttcttcgccccaaagagcgaccttatcagaccaacaatttttataccgcccttgcgcggcaggagcgattagataaggaggtacgggcgattgtcaaaggaaaagggaaagacccaaaacaaaaagcgtaaacttacgcggcaggaaaagaaacagatcgacgcgcttatccggcagtcaaagggcgacgggaagccccatacggcgcaggacagcataccgtttgaacgaatgtataaggacgggatttgccgccttgcaaacgggcggtattccaagtgcattgagtttgaagatattaactatcagcttgcgcagccggacgacaagaccgccatttttgaagccctttgcgatatgtataactcttttgacgcttctatcagtgtgcagctttccttaatcagccgccatgcgaacaaggaggatttcaagagcagtatcacgattgccccacagaatgacgactttgacagtatcagagccgaatacaccgaaatgctgcaaacacagcttgaacgcggcaacaacgggcttatcaagacaaagtttctcacctttaccattgaagcaaaagatattaaatcggcgcgggcgcggcttgcccgtatcgaaacggacaccctcaaccattttaaggtgatcggcgcggcggcgcgggtattggacgggaagcagcggcttgaagtgctgcatgggcttttccacccggacggggaacgcttcaactttgcgtgggaatggctacccgtaagcggcctttccgtcaaagactttattgccccgtcctctttccgttttggcgacgggcgaatgtttcaaatgggcgggaagtttggcgcggtttcctttttgcagattgccgcgccggaactttcagaccgtatgcttgccgacttcatggaagcggaaaacgggattgtcgtcaatctgcacattcagagtatcgaccacaacgaagcgatcaagacgatcaagcggaaaatcaccgaccttgaccgtatgaaaatcgaggaacagaaaaaggcaatccgcagcggctacgatatggatataattccgtccgaccttgccacctacggcggcgaagcgaaaaaccttttgcgggatttgcagagccggaacgagcgaatgtttttgcttacgctgttagttttgaatgtggcagacacaaagcagaaattggacaacgacgtatttcaggccgcaagtatcgcacagaaatacaactgtatgctcacccgccttgactaccggcaggaacaggggcttatgccctctatcccattgggcgaaaacctaatccaaatccagcggggcttgacgacttccagcaccgccattttcgtcccctttacggtacaagagctgttccaaagcggcgaagcgttgtattacggcttaaacgcattatcgaataacatgattttgtgcgacaggaaaaggctgaagaaccctaacggcttgatactcggcacacccggcagcggcaagagtttttcggcaaagcgcgagatcaccaacgcttttctcattaccgcagacgatattatcatttgcgacccggaagcggaatattacccccttgtggaacggctgaaagggcaggttatcaaggtttcgcagaacagcacgcagtacattaacccgatggatataaacctcaattacagcgagggcgacacgcccatagccttaaagagcgattttatcctttccttttgcgaactcattatgggcggcaaaaacgggctggaagctgtcgaaaagaccttgattgaccgcgctgttatcagcgtgtaccgcaactaccttgccgacccgaagccggagaatatgccgattttgggcgacctctacgacgagatcaagaagcagccggaaaaggaagcgcagcgtatcgcggcggcattggaactctatgtaaacggcagcttgaacatttttaaccacaggacaaacgttgacattcataatcgccttgtctgctttgatattaaagaactcggcacccagctacgaaaactcggtatgctcattgtccaagatcaagtttggaacagagttaccataaaccgcagcgaaggcaaggcgacgcggtactatatcgacgagtttcatttgctgctcaaagaggaacagaccgcagcgtacagcgttgagatttggaagcgttttagaaaatggggcggtattccgacaggtatcacccaaaacgtgaaagatttgttatcgtcccgcgaggtggagaacatttttgaaaacagcgattttgtgtatatgctcaaccaagcccagggcgacagggaaatccttgcaaagcagcttaacatttcgcagcagcaaatgacctatgtaacccattccgacgcgggcgaggggcttatcttctatggcaacgtgattttgccctttattgaccgtttcccgcaagatacggaactctatcgtgtaatgacgaccaaacccggcgaggtgtcggcatgaggatagaaatggacaaaatctattgcggcgacagcttgcaggtgcttcaaaccttgccggaaaatgcagttgattgttgcgtaacgtccccaccctactatgccttgcgggactacggcgcagacgggcagatcggacgggaagcaacgccggaggaatatgtttcccgtattacggcggtattccatgaggtaaagcgggtgcttacgccggagggtacttgttggctgaatatcgcggacacttattgcggcacaggcagcaaagccgaccaccaagaccccaaataccccaaaggcaggaacgggcagcaagtggcgtttaaccaccgcgcccccggctgcaagcccaaagatttaattggtattccgtggcttgtagccctcgccttgcggggcgacggttggtatttgcgcagttctatcatttggcacaaaacaaaccccatgccggaaagcacgcgggacaggccgacccgctgctatgaatatgtgtttctgcttaccaagtcaaagaagtattattacgattggcaagcagtagccgagccgatagcccccacaacggcggggcggctgaaaagcggagttagcaaaggaaataagtataacgttactgttccggggcaaaaccaaccgcagaaaatcaaccgcccccgcgaaaagggcgcatacgccgacgagttgatttctcccgtccgcagccgccgcaacgtttggcagattaacaatgtcggctatcatggcgggcatttcgcagcgttcccgccgaaacttgcggaaacgtgcattttggcgggctgtcccatcggcgggattgtccttgacccctttttcggcagcggcacgacgggcatggtagcaaaacggcttaaccgccgctatatcggcattgagttaaaccccgactattgcgaacttgcaaaacagcggattggaggtgatgaagattgagcaaggaactgaaagcccccgacaaggtaacgcaaaaaatgacccgcgacggtgcggttgcggaaaacctcacgacgggcgaaacgtccagtatcagcgaaaggccgcaggaagaaaactattcagcccccgcaggggtggcagcggaaaaggttgtgcagcatatcggcgcagagattgagcgacacgcagcaaaaggcgcggagaaaaaagcccttgacgcgacgcagcctaaaacccattcttcccgcttgcagttttccgaagcggaacgggcaacgccggaacttcaaaaagcgatcaagaaatcggataaggcggcagactgtttagacgcagcgcgggcggctatccccaagcagccaaaatcaagaaagagcgcgtttttgacgaagcgaaaggcaaggcaaagacgcgcctttcctttgaaaagacggataagcccccaaacggcaagttgcggcataaccccttatcccgtccggcacaggagttaaacagtaccgtacatgggaaaatctacgaggtagagaaagaaaacgtcggtgtggaaagcgggcaccgggtagaacttgccggagagaaagcgggcggcatggcggcgcgggcagttaagggcggcatacgccgccataagctgaaaccctaccgggcagcggcggcagcggaaaaacaagcggtaaaggcaaacgcagattttctctatcaaaaggcgttgcacgataaccccgcgcttgcgcactccaaccccatttcccgtttttggcagaagcagcgcattaaaaagcagtatgcaaaaacgctgaaagcgggcggcaaagcgaaaaaaaccgctgaagccaccgcaaaggcggcgaagaaaaccgcgcaggaaaccaaacgggcgacgttctttgttgtccggcattggaaaggctgcttgattgtgggcgggattgcctttatcgtgctgctgcttttcggcgggctgtcctcttgctccctctttggcggcaacagcggcagcggcttgattgcgtcgtcctatctctccgaggacgcggatataacgggcgcggaaagcgcgtatgccgctatggaagccgagttacaagatatgctggacaatatcgaaagcgaataccccggctatgacgaataccgggtaaacgcggacgagatcgagcatgacccctatgtgctaatttctatcctttccgcgtggcatgagggcgtgtttacactcgatgaagtgcaaagcacccttgaaatgctctttgagaaacagtatatcttgacggtcgaggaagaagtacaggtacgctaccgcaccgaaacaaggacggacagcgagggcaacccctatacggttgaagtcccctataactattacattcttcatgtggatttggaaaacttcaacctctcccatgtccccgtttacatcatgggcgaagaacagctatccatgtacgctatgtatatgtcgtcgctgggaaacagacccgaccttttcccgcaatccggctatgtgtctaaatactatgaaaacccgcccgccgattatgaagtacccgccgcgctgctgggttccgatgaaaagtttgcgcggctcatggaggaagcagataaatacgtcggttttccctatgtgtggggcggcagcaccccggaaacctcttttgattgcagcggctttgtgagttatgtgttgacgaacagcggcctatacaatacgggcagacttggggcgcaagggctttacaacatctcaacccctgtttctaacccgcagccgggggatttggtgttctttacgggtacatacgacacccccggcgtttcccatgtggggatttatgtgggcgaggacggggacggaagccccgtcatgctgcattgtggcgaccctatccagtattcaaagctggacaccagctattggcaatcccacttttacgcctacgggcggttaaattacaattaaaaggagttgaaaaatgaatattgtatcttttggcggcggcacgaatagtgccgccttacttattggcctatacaagcacaaaatcccgattgaccttatcacctttgccgatacgggcgcggaacacccgcatacctatcaatttatcgagataatcaatcaatggcttgcggaacacggtatgccgcagattaccgttgtgcagtatgttgaccgctacggcaaccgcctatctcttgaaaccgagtgcttgcgctctcatacgctcccgtcgattgcctacgggcataagcgttgttcgcagaaacacaaaatcgcaccgcaggaaaagttttgcaaccactatgcgccttgccgcgaagtatggcagcgcggcgagaaagtcaaccgctatatcggctatgacgcgggagaagtgaaacggtatgaacattcccgcaagtacaacgaagccgacaaaaaatatcataaccgctaccccctcattgaagaatggggctggaacagggacgattgtatccgggaaatcaaagcggcaggattgccgcagccgggtaaatcgtcctgtttcttttgtccgagcatgaagaaacaagagattttatatctcaaagaacactatcccgatctatttaaccgggcggcgactttggaagaaaacgctatgccctatcttaaaaccgttaagggattggggcgcagctattcatggaaagaacagtttggaaaggagtaaatgactatggcgaacacgaaacttgaccgtatcgaaagggatattgagaaaacgagggcaaaaatccttgaacagcaaaagaagctgaaagaccttgaagcgcagaaagtcgaggaagaaaacgcgcagatcgtgcaaatggtaaaggcggtacaccttgacgggacgcagcttgccgcgttcctctccgcttacgccagcggcgaaatcaccttgccgcagccggaagccacttaccccgccgaacaggaggacaacgacaatgaagaataaaaagataatccgaaagtttaccgtattgcttgccgcactggttatcatgtgcggcttttctgttaccgcttatgcgggcggtggcgatgaaagcgacgacacgcctacccccgtaaccgaggaaacccccgcgccggaaaccgagccggaagaaacgacgggcggctatgagccgcagccccttaccccggacgggaatatgtcccttgtggacgatataacgggtgaagcgtccggcgacaagcagtttatcaccgtcgttaccaaaagtggcaactatttttacatcatcattgaccgcgccgaggacggggaaaataccgtccatttccttaaccaagtggacgaagcggatttaaccgcccttatggaggacgggcagaccgaagcccccgtttgtagctgcaccgataaatgcgttgccggaagcgtcaacaccgcttgcccggtttgcagcgtcaacatgagcgagtgcgcgggtgtggaagccgagccggagccggaagaaaccgagcagccgccggaagaagaaaaaggcggcggcatgggtattctgcttgtcgtgctgcttgttgccgcagcgggcggcggcgcgttctactactttaagattttgaagcccaaaaaggacgcggcgaaaggcagcagcagccttgacgaccttgattttgacgaggacgacgaggaaacggaagtagtcgaaaccgaacagaccgagcaggaggacgataatctatgaaacttgtaattgcagaaaaaccgagcgtcggggcggcgattgccgccgttatgggcgcgaatgaaaagcgcagcggatattttgagggcggcggctaccttgtgtcgtggtgtatcgggcatttgattagccttgcagacgcggcgacctacaatgaacaattccgtaaatggaagtacgacgatcttcccattgtcccgcaggagtggcagtttattgttgccagcggcaaggagcagcagttttccattctcaaagaccttatgcaccgcagcgacgttaccgagattatcaatgcttgcgacagcgggcgcgagggggaactcattttccgctttgtctatgaacaggcgaattgcaaaaagcccttttcccgcctttggattagcagcatggaagcaagtgcaatccgcgagggcttttcaaatctcaaagacgggcgcggctatgacaacctctatcaatccgcgctttgcagagcaaaggccgattggctcattggcattaacgcgacccgccttttctctatcctctaccataaaacattgaatgtcggcagagtgcaaacgcccacccttgctatgctggtaaaccgcgactatgcaatcagcagctttaagaaagagaaatatcatgtcgtccggctggacgttggcggcgttgccgccctttccgaaaggcaggacgacgaagcggcggcgcggcagatgaaagcggcttgcgagaaatcgcaggccgtttgtacttcccttaaaaaagagaaaaagaccgcagccccgccgaaactgtttgacctcaccgccttgcagcgggaagcaaaccgtttgtatgggtttacggcgaaacagacccttgactatgcgcaagccctttatgaaaaacggcttttgacctatccccgcaccgacagcaaatatatcacttccgatatggagggcagcacaaaggaacttatcaccggcctttgcgctgctctcccctttatgcagggcgtgaagctgcaagccgaccttgcgaggatttgcgacaacagcaaagtaaccgaccatcacgccattttgccgacagcggagtttgtgaaaacgggcttttcttcccttgccgaaagtgagaaaaagctaatgacccttgtgtgcgcaaaactgctttgcgccgttgccgcgccctatgagtatgaagcggttacggcggttttcacttgcggcggctatacctttaccgcaaagggcaggacgacgctttgcgagggttggcgcgagattgaaagactatcccgcgccgcgtccggggaacaggacgaggacgcagagccggaagcggttttacccccgcttgccgaggggcagacctttgacaatccggcagcggagatctccgaacgttacacgcagcccccaaaggcatttaccgaagatacgttactttcggctatggagagtgcgggaaaggaggacacgccggaggacgcggagcgcaaagggttaggcaccaccgcgacgcgggcgggtatcattgaaaaactcattagcgcgggctttgccgagcgcaagggcaaaaagctaatccccacaaaggacgggtataaccttgtcgctattctgcccgacagccttacgtccccgcagcttacggcagaatgggaaacgcgccttaccgggattgcaaagggcagcgacagccccgccgacttcatgcgcgggattgaggaaatgacagcggggcttgtcaagacctattccgcgatttccgaggataaagcgaagctgtttaccccacagcgggaagcaatcggcacttgcccccgttgcggcgcggcggtttacgagggcaagaaaaacttttactgctccgacagggcttgcagctttgtgatgtggaagaatgaccgcttttttgagcagcgcaaaaaggctttcacaaaggcgattgccgccgcccttttgaaagacggaaaggtaaaaatcaaaggtatgtactcgaccaagacgggaaagacctttgacggagttgtgctgcttgccgacacaggcggcaagtatgtaaacttccgcgtcgagcagaaccgaaaatgataaggcttgatgaaaagcaataccgcgccgtaaagaaaatgacccgcgccgcttgtgcaaacaacgattgcgggaattgtctgctgctggacgacggggaaacttgcgtttgtgtgcagagtatcagctattcgctgctatgccgctatttccgcgaagcggtattacccgccgacaggcagctttgcgaacagatcacccgcagcggggaaaccgatttgaagcgttgcgcggtatgcggcagcacgtttgcggcgggcagcaaccgggcgaaatactgccccgattgcgcggcaaagatacgccgcagacagaaagcccaaagcgagagaaacaggcgtttacggataaaaacaactacatagcaagcacagcaaacgagtacccgtttgcgagaaatgcccgcgcttcccatagagagcgcgggcattttgcttgttgggatagtcccaaacccttatatgaccgagaaaggacgtgatgaaagaatatgccgtattcctcatacgaccatgacaaattagaagccgccgaaaccatgcggatagaacgccggatatattttgaagcaaaggacagggagattgccccttatgcttccttgccgattgcgcagctactttccatgcgcagcgaaagcgcggcggcagaacaggcgatttttgacgaccttaaagaacgcgccgccgcatgggaagaacaggcgggaagaacgcttttgctggataaaacacttgaatatgtgagaacgccgcacgtccagcacaccgctaacgagtggcagaccaccgagcataaccgccatattcgcagcaaccgggtatatcagatgaattactacatttacgagaatacccgctacgacaaagaagcgcagaaatctatcccgtattcatggacgcttacatggagcgtgcgcaccaacagcccaagcagaacccaagcgaagattgccggacaagatagaaaggttttcaccgacaaggcagctatggaaaagtatctgaatgggcgtatcaaagcgtatgaccgcttgtttacggaaatctccccgcctatcccgcaggagtacgccgactatttcaaagtaaacggtatgctcatgccggactacaccatagagggcgaagaacccccgcagcagcaacaggcggcagctatccccgaaaataccgggcaggaaaaggagcgtgaacacatgagcgaacagttttctattatgataggcaaccgcagccgctttgacgcgggcgaccccggcggctattggttggatatgcccgccacaaaggagcagttgcacgaagctatgcggaacgtcggcattaccgccgacaacccgcaggatttttccattcgcggctattccgacgacccggagaaacatattgccttgccttatgaaatggtatgcgccgccgacgtggacgaactcaattttcttgcggcgcggctcgaacagcttgaccccgccgaggttggcaagctgaacgcagctttgcagcagaaaaacgggcttgcaaatattggacaggtaattgacttcacctacaacgtggatttttacgtccatatccccgaagtacataactaccacgatttgggcgactattacttaaatcaatccggcatggtacaaatgcccgaagaatggaaaggcggcattgacctttctacttttggcaggaacgctgccgcgcaggaaaaaggcgcgtttaccgagtacggctatatcgtggaaagcggcgacgagtgggaacggcagtttgaggggcgcgaagtgccggaagaataccgcattatgagttacccgcagccggagcgcggcgaacaggacaaagcctatatggacgcagccgaaacgcagcaagcagacgcacaggccgcagagccgcagcagccccgccccgtcgtccccattatccttacttccgaaaagcccgccgaaaaggtaaaggagatcaccgcgcgtttggaacagggcgtacaggcgatttttgacagcgaccgctacaaagagtttctaaccgctatgtcaaagttccatgattatagtttgaataacactatcctaattgctatgcagggcggcaatttggtaatgggcttccgtcaatgggaaaaggagtttgaccgccatgtaaagaaaggcgagaaaggcattaaaatctttgcccccgcgccctacaaggtgaaaaagctggttgataaaatcgaccccgaaacgagaaagcccatgcttgaccgcgagggaaaagtggtaaaggaagaaaaggaaatcaccgtccccgcctttaaggttataaccgtctttgatatttcgcagaccgagggcaaggagtttcccgacctttccgttaaaccgctgcttgccgatgtggagcagtacgaggattttttcgccgcccttgaaaaagcgtcccccgtcccgattgcatttgagcagatcacaaacggcgcaaatgggtatttcagtttgaccgacaagcgtattgcaatcaaagagggcgtgagtgaattacaggcggtaaagaccgccattcacgaaatcgcccatgcgaagctgcacgacgtagacttaaacgccccgccggagcagcaaaaccgcgttgaccgccatacctgcgaggtagaagcggaaagcgtcgcttatacggtttgccagcatttcggccttgatacttccgattactctttcggctatgtggctggttggagcagcggcaaggaaatgaccgagttaaaagcgtcccttgaaacaatacagaccaccgcaaaggaactcattaccgagattgaggggcattttaccgagttgcagcagcagcggcaagccgagcaggagcagggcgataccttttccatttatcagttaaagcgcggggacgaaacaagggacttgcgctttgagccttatgaccgtctgcaagcggctggacttaccattgaccgggtaaattatgaactcgtctatactgcaccgcttacaaaggatatgacgctgggcgacatttgggaaaggtttaatatcgaccaccccgccgactttaaggggcatagcctttccgtttccgacattgttgtgcttcatcagaacgacgaggacaccgcccactatgtagacagtatcggttttcagcaagtgccggagtttttgcaggagcagcagacccccgtatttgacaagctgccgcccgaacagcagcaagccttgtccgacaccgtacaagacactttgcaaatgctggttgacgcagacaagcggatttatggcgacgttacgggcaagacccttgaagcaatcgcggcgcaaggatattcctacaaggacgggcagcttgaaaagcagcagccggaagcgacccccgacagccttttgacgggtgaaaccgttagaacgccgaggggcaattttcatattaccgatatgagccgtgaacagatcgaagcggcgggatttggttttcaccatgcgtcggaggacgggaagtatctcattatggggaatggcacacaggcttatgccatagccgccgagcagccgcagcgggataatcccttaaagcacgtcgaggacaccatagagcagaacgacaacaattttgacgggcttatcaacaatacgccgcaaacgcccaccgttgcagattttgagcagcgggcaaaggcgggggaagcgatttccgttaccgaccttgcaaaagcggtaaaagccgagaaacgggaacagccgcagaaaaaaccgtccattttgaagaagctggacgaatacaagaaacaggcggcgcagcagccgaaagataaacagaaagagcataaaaaggatttggaggtttgatagcatgaatacccgctttaccattgaggaagaaaacattgttgcgatctacgccgaggacagccgggaaacaacgcttgaaaatatccttgccgccatgccctacatggacgaggatatgcgccagcttgccgccgcagcggtgaacaagctgcaagccatgacggacagcgagttttccgaaagggagtttatcttgaccgacgaggaatagcccatagagaacaggggcgcggttgccgatttccggcaccgcgcccctgttctttttttgtccttgcgtggacaattagaaagccgtttttgcgggtttgaatatactttatcgtctatgtcgttttcatgcgctggaagccgcagaaacacaggcgttttcagcccttaacattccacttgccaccccatgttttgcgccttatcgctcctgctcccgcgccctgctttgggacgggtaaagaatactatcgacgttctttttgacaacgccgtattcctgcatttgcttcttggcttgccgataatcttcatacaatttggttttcctgtcgtttaagcttctatactccttgcgcagcgcggcgagatcgggcagcttctttatctgcatttcctttaatgcccttgccgcagcttcaaacaggataatttcgctttcatgcccccgcagatacttttccttgtccggcgattttcggtattcatcgtaaatcggttttaactgtcggtatgtggtggtgtgcttgataagcagcgacaaatcagacatacgctgttccacttccttaaccgcctttgccgccgcgtcatgggcggtcataatatccgcaattttgctttcaaggtcgctataatattcaatcttgttttcggtcaagaagttcatgcttttcgcagcctgtttcagattatggattttcgcccaccgttcatagcccgccgattgttgggctttgatactgttttcaagatcgacgacaagccggattttcttatcttcccgcagcgtttttgttttggcaacatacacgcccttgatacgctcctttatcgcttcttccgtataggccgcgccgagcgtctttgtgcgggtaaaccgttcctgtccggcagcgcgaaaggaaatgtatttgccctgtttgatttcataccccatttcctgcaagcggcgcagcagttcgtcaaaatctttcacttggggaatgagagtatctatcgccgttttcagctttgctttgtagcttgtcccttgcttttcggcggtgtattctgcatagctttttcccttgtcctgtcccggtacgacgacggatagcccatgctctttacatatcctgtcgctggtgcgccggataaagtgatagctttgcttgttggaatggtactttttgtagtcaacgaagctaaccgcgttgaaaatcaagtgattatgcagatggtctttatcgacgtgagttgtcaaaacaaactcatacttgccgcctaataccgccccggcaagttccatgccgattttgtgcgcttcttccggtgtggtttctcccaccgcaaaggattgtatcaagtgccgccctaaatgtgtgccgcgatctccggcagcttcccgcgtccatgcaaactcaatatcggcggtttccagcccgcagccgaaagaggacgcaagcagcttcccgtctgtcttttcgggatttaagatatagtctatcgcagcctttaaggttgatttaatagggtgcgtctttgtaaccgccatatctcgtccaccgcctttttaatgtcctctatatcctgcctgtaaaccgtccccgtcgcattggcgcgttttgcaatttggttgatgttccggcttaccgcttgcagttcccggatatatgcttttgtgtcgcttcggtcaacgacaagaatatacccgtctatcgccattttacggaagtatgccccatactgctttatgggaagctgcttcatcttctcgtcgatcagccgcttttcttcttccgtaacgtaaaacttcatctgtatatttctctttcggttttccatttccgcaccgcctttcggtataagggtttgggattatcccaacaagcattttccgcaaacgggtactcgtttgctgtgcttgctatctactccatacccccaccgaaaggcggtatttgttgcgcgttcctttgattttggacgcaaaaaaagattgcagccgccatgcgctgcaatctcccgatttctcatattgtgaggttaatcctctgctttttcgacttccgttatctcccttgctgttgcggttacaatccgtatgcctttatcgctcataccgtccagcagcgcgtcaagctgccgccgcccggtggatttctccgcattgctgttcgggaagaaaaattgatctaccgaaatatgataccgggttacaaggtcatagaatacctgtaaactcggctgttgtcccttgttctcgatattcgcaaggtagcgcggggaaatatataactcgtcgcttacctttttgcggctctcgccgtattcatttctcgcggcttttatagctgccccgaaagccttaaagtcgtacaatggtacgggtctttttgccattttcattcaccctgttacattttacagttcacctttctttttggatatgtccacacaattcatatcattaggttaaatacttcctgttgtgtattgacagtagactgattttctgataaaataaaatttatgtaaaaggaggcggcgtttatgttgcatagcatgcgtattagataagcattgaaaaaaaggattttcccattttcaacatgggcttttttgtcatgcttattttgcggatgctatacaaaaaactaacgacgtatagatatagtatagacatagtgcaagctatgccttagttttgttgtactgctctgtgcattataaatgcaggtcaatgctcatgttgaggattgacctgcatttttttgtgtaaaaaggacgagtgaaatataatgcttaaaaaatattggataaaatgtccgatttgtaacggaaagacgagagttcaagtatttcataatactgtattaaaagattttcctcttttctgccctaaatgcaaattgacgcatatcattgatgtagaaaaattagagattgtaatcaaaaatacagaaaaacaaacttttattatttagaagaaaggatataaaaatgaaacgtttacctaaatatacgcctgcggaagtacggaatgatccatacggatttacttacaaagaaatgtcggaagttattggcgagaatgaagcaaaagccttatatgaagaattatataagcaattaccacgcaaaaaaaatctatcaatgttggtaaaaaatatttgcaaaagcagtgatactgaaaagtatgtttacgaactgaaagacaacaaatacattgaaacggtttttatcaagcggcgagatggtggaactgtttgcgtgagcacacaagtcggttgtcctgttggttgtattttttgtgagtccgggcgaaatggctttgttcgtaatctaacatcgtcagaaatcgtacaacagattatattgttgcgtcgaaaagtaaaccgtatcgtttttatgggtatgggagagcctttattcaattatgacaacttgataaaagcaatccatattctccgagatagatatgggctcaactttccaaccgacggcattaccatatcaacagttggtccggtcgatcaattaaaaaaattgcgcgaggaacatcttaaaattcagttgacaatatctttacacgcagcaacacaatctgcaagaaatcgtattattcctcacatgcgcatatatgctattgaagatgttgttaagcaagccttatcctattctgaaaggcataatcgcaaaattgtctttgcgtatttgcttttaccgggtataaatgaccggccctcagatgtaagacaacttgcaaaatggtttcggggcaaaaaagttatgattaacgtgttacaatacaacccaacaagcaattcaagaattaaagcaccacagaaacgggaaatagttgcattcaaacatcaattagagcaagcaggacttgaagttactatgagagtttctcatggcagagagattaacgcggcttgtggacagttagctaacacatataataaattcaaaaaaaaatgattaaaagtgccagacgcatagacgcagagccgataacgcattaggtcaaaaaacctatgtgttatcggcttttttatttaatattgcgcaaaagccgctgttccctattatagaatggattgcgggtagtgtattaaagtcgcccttttttaaggatacggcggtatcggggaggtatcgccgtgtccatttttatttactgtaacccgcctaatgctttgcggtcaaaaaaagctatgctccgcaagcgggatattccggctatgaatgtgaactgtcaatacatttagctactgcttacatttcctttgcgcccgtccgcgtcttgcggacgggcgcattttgcttttttcaacttttttctgaaaagcgcactcaagagccatctcccgaacgggtacggagcgaaaggggcagagaggacaagcccttaactcccgtcctctactccacgcgggaaggaggtgaactctatggagctatcttcttccgacaaggaaagaatacaacatcagtacgacgcattagcaaagaaaactttggtcggcgaagcgaaaagccaccgccgcactcttgcgaaacgcgcagcacgcgaagttactttttcggatttgagcgaaagcgaactcgcgcagcttttcacaacggacgaatacaaaagcgattatttccgttttcaagtgtccggctttgatgtactcgtcaaaaatgaactgcttgccgaagcccttaacgctttgcccgaaaggaaacgcgacattatccttttgtcctacttcttggacatgagcgacgcggaaattgctgaactgctgaatgttgtacgcacgacggttttccggcacaggaaatccgcgcttgcgaaaatcaaacagtatttggagggaaaagcagatgatgaataccgttaggaaatctgaaaatctgttgccgttccctgtcatttccgcagcggcaaacggcgacacaaccgccatgtgcgcgatcttgaagcattacgagggttacatagcgaaactttgtacccgcacgctgaaagacgacgcgggcaatacctattcctatgtggacgaggaaatgcgtaacaggctgcaagtgcgccttattacccgcacccttgcttttcatgtaggataatcttttagcccatgcggggagcgtgtcccctttccacgcttcccgttatgggctatttgtcgttccgtaacagcacatcggaaacggtgtactgttacaggccgacaaagcctattgttccttgacaaagaaagcggcctttggtgcgcagcataacaggcaacgggtacattccgtctgtaccgagccgggcggcgggtacgccatgaccgcttttccccgttggggaaaagtcgagcgagaactaccgcgccgtaaaacaagtttagcagcttgtgggcgacgacatacaaggcggcacaatgatactcccgcgttgaacaccctcaaagtattgcgcggcgcacccataagcatgggccggggtgaaactcccgtgaggttgcagctaacaaccgcccgttttgccttttgacgaatatagtttatccatacaggaaaaggaggtttttctaatggataaaaaacagacaattacaaccgaacgcaaaatagggaaaatcacctatcttgttcaagcgttgccgagtgaaaaggcaaccgatacaatccataaaaagattgaaaaactcattgtaaaggatttgcagaaaaagcccggaaatccgggatttttagcgtccgagtagtgcattaggcggcgggatatggtataatgatagcaacacattatacctgtttattcggctgtcggaaaggaggactaatgttacagtcgaataaaatcaccgccctttactgccgtttaagtcaagaggatatgcaagccggagaaagcggaagcatacagcaccaaaaaatgatacttcaacgctatgcggacgaacaccattttttgaacacaaagttttttgtggacgacggattttccggcgtgagttttgagcgcgaggggctgcaagcgatgttgcaggaagtggaagccggacgagtggcgacggtcattaccaaagacctttcccgtcttggcagaaactatctgaaaacgggcgaactcatagagattgtatttcccgaaaacggagtacgctatatcgcgatcaacgacggagttgacacagcgcgggaggataacgagtttacccccttgcggaactggtttaacgagttttacgcccgcgacacaagcaagaaaatccgcgcagttaaacaggcacaggcgcaaaaaggcgagcgcgtcaacggggaatatccatacggctatatcccagacccgaacaaccgccaccaccttatacccgacccggaaaccgcgccgattgtcaaacaggttttcgctatgtttgttagcggcgtgcgtatgtgcgaaatccaaaaatggcttgcggaaaacaaagtcttgacgattggagcgttgcgctatcagcgcacaggacaggcgcggtatcagcgggcaatgatcgccccctatacttggccggacaaaacgctctatgacatattagcaaggcaggaatatttagggcataccataaccgcgaaaactcacaaggtatcctacaagtcgaaaaagacccggaagaacgaagaagaacaacgctatttcttcccaaacacccatgagccgcttgttgacgaggaaacctttgaacttgcgcaaaagcggattgctacccgccaccgcccgacaaaagcagcggagattgatattttttccggcttgctgttttgcgctggttgcggacataagatgtattaccaacagggcgtaaatatcgagccgcgcaggttttcctattcttgcggcgcatggcgcaacagggcaaggacaggcagcgagtgtacctctcattatatccgcaaaaacgtacttcttgatttagtgctggaagatatgcggcgggttttgcagtatgttaaggaacacgaacaggactttatctgtaaagctaccgagtacggcgacatggaagcgagaaaggcattagcgcagcagcaaaaggaactttccaaagcacaggcgcgtatgaccgaacttgacacgcttttccgcaagctgtacgaggacaacgcattaggcagactgacagatgaacggtttgtgtttctaacttccggctacgaggacgaaaagaaatcccttgccgcaaggatagacgagttacaacagcagatcgcaaccgttaccgagcgaaaaagggatatatcaaggtttattcagattgtcgggaaatacagcgacatacaggaattgacctatgaaaacgtccatgagtttatcgaccgtattttgatacatgaattagaccgggaaaccaacacccggaaaatcgaaatccattacagctttgtcggacaggttgataccgagcaggagccgacgcaagttgtcaaccatgaccgccgcaacatggtagatgtaaaaagtatcgctatctaacctcagcaaatgttgttccgctgataccgtcatcaacaaagaattgcggatgtaaatatccgtttttctttgcataagtcataagaatttccttttgagacgagatttgccaaggtatgtttttgtaaaggagtgtgcaattcgcattgacaagcagcaaaaagaacgctataataatgtcgttatcgataatgacgttattatttaggcgcagaggagtgaagacatggccaatagggatcattccctggatgatgggattattcaggctgcttattcggaatttcttgcttacggctttcagaaagcctctctgcacaagatcgccgaaaaagccggtgttactacgggggcaatctacacaagatacaagaataaagacgcgttgtttgccagtctgcttcaggatttttttgaggcgatgcaggttctctttgctcccgtcgcggaagaatacgaaaatgcaaagcacagtgcgcagccagaggatatcctccgcgccataaacgccgaagaacaggtatattttcaactgctgaccgagcactgcaatgactgcactttatttttctgccgcagtgatggcagctccatggaaaccgtgctgcatgaactgatgaaccgtaaagcggaacaaacggtagagttcttttcacatatctatggaaaagcgccaaatgccgatgcgatccgtcttttgatgggctcacagttctggtacttccgccagctgctggatcagcatatggaggaaggcagaatgcttacctgcttacaggcagtccttgatttcaccaacgccggttggcggcagctatgcgataccttgcaataaatccgaaaagttgattcggacggtccatccgtccgtttcttacgactgttggttagaaatagctaactaatgagaaaagagtttgcgatgatagattttgaatttgaattccaatatacggaggcaaagctgcccatcctccgacaggtcggcggcggcatcccggcgggacgctgcgtggtgctctgcggaggcagcggatgcggaaaatctacgctgctgcggtgcatcaacggactaatcccacaattttacgagggagagctgaagggcttttgccgcctgaacgggcaggacaccgccgggctgcgtatcggcgagatcggcgagctggcagcatcggtatttcaggatccgcggagtcagttttttaccgtgaacagttccaatgaagtggccttcggccttgaaaatcacggtctgccgcaagataaaatccgtcagcgggtggaggatgccttccggatctttcatctggagcggctgaaggatcgcaatgtctacgagttgtccagcggcgagcgacagctcatctccatcttgtccgcgtgggcaatggacacagatatttttctgctggacgagccaacggccaacctggactttgcagccacgcagcagttaaaagagattctgcttgccctgaaaacgcagggcaaaacgctgctgctcagtgagcaccggctctactatcttgccgacattgccgacgaattttgggttatggcagacggcgagatcaaaggaaaatacactgccgcagaggcaaaggcgttctcggcggagcagagacaaacactttctctgcgcacgctcgaccttgcggagatcaccgtgccggagaaagagccgctgccgaaaaccgcgccgacggcgcttgccgtctcagatgtccgctatacatacggcaggaaggccggagataccctctctggtgtcagcttttccatccgtgagcatgagatcatcggtctcgtgggcgcaaacggctgtggcaaaacgaccatcggcaagctgattgcggggctttacgatccctccggcgggcagatattcctgtacggcaaagcgcgaaagcctaagggtctgcaaaagcaggtgctgttcatcctacaggaagcagagtttcagttcttcaccaactccgtcctgcacgaactgcaatacggccatgcggtgacaccggagtttgaagcaaaaacggaagcgctgctgaaaagtatggatatgtgggactgccgcgaccggcatcccttttccctctccggcgggcagatgcagcgtctggcgctgatgatggcgtatctgtccgacaagccgatcgtcatactggacgagccgacagcaggacaggacgcggaaagtctggagcggtgcgcggcgctgatccgggaaatgcggaaggaaaagacggttctcatcatcacccatgatctggagctgattgcaggtgcgtgtgaccgctgcatcgggctgtcggatggacatgcagaggcagaatttcccgttcattcggaacgtgatttgcaagcggtacggcaatatatggagcgcttccatccttccgatgctcctgcgaaaaaacagcataaagaacgattccacccggcaacgaagctgctttactggctggccctgttggtcgtgatctccacggcaaacaatcaccttgtctatgcctgttatgcggcactgatcttgctgaccgcaactgacggatggctcggaacggcaatcgcgggcggcataagctttggggtgctgtgggcggctaacgccatgctgccgggcacggtgttttcctttatgctggtgctgttcccgcgtatcattgccgttggcatttccatgcggacgctgattgggcggaatgaagccagccgtaccctggcggcgctgcgtaatctgcacctgccggaacggctcattatgatcgtagccgtgatcttccgcttcttccccgttctgtcgggagacatgaagctactgcggcaatccatccgcacccgtggcgcatttgtgacgccgtggcaaaagctgcgtgcgctaccatcgtatctggaaattctgaccgttcccatggcgctgcgggtcatccgcattgccgagacgctgtccgcctccgccgaaacacggggcatcgacttaacccgccgtaaaagcaactatctgtcgcttcggttttctgcgtgggatgctgtgttctgtgtcctgctggcagcatcgatcgccgccggccttatcctgtgatcgccgtctctgcgacgttcaaacatatttcattcaaaaaggagtctttaccatgagtactgcaaaccccaataaactgaaagtcaaggacatcatcaccgttgtcctgctggctctaatcaatgtggtcattttcttcgccagctccgtcctgtacgcaacgcccattaccatcattctgatgccggtgtttttcgccctgctggagggcatcgtctacttcatcatcggcacgaaggtgaaaaagcccggtgcaatcctcatttacagtatcgtccgtgccattatgggcggatacctgccgtacatcatcctctttattctctccggtgtcattgctgaactactgctgtggaagatgggctacggcaatgcgaaggcgctgaccgtcagttatgtcatcaatcaggtgctggccgcattcggcagcactatcattccctacgccatcgcagccaaggctatggcgtatcagatggtcactgatggccgtcaggacgccatccttgccgcatcccagatgctgcaatcctgggtgtctgtggcgctggtggccggtgtgatcgtggcggcctttatcggcgcaatgatcggcaagcggatcgtgaaaaagcaccttgctgcgtaatgcagtcgaaaggagttcaccatgaaagaaattgagccaaagcgctctgccgcctcatggctggcagagctggcaaaagggcggtacggcgagtacgctttgagcgtccttacggcgctgctgggcgttgcctgctcccttgcgccgtatttcatcatcattcggatcattaccgcgctgatcagcggcacggcggagctgtcgtactgcctgacgctctgcgcgtggatggcgggctgctgggtgctgcgctatgtgctgcacagcgtgtccacatccctctcccatcacgccaccttccatgtgctggccaatacccgcacacggctgctggataagctggccacgttgccccttggcacggtgctggaccattcctctggctcctataagaacattatcgtcgagcgcgtggactccattgaaaccactcttgcccatttgctgccggagatgacagccaacattgtgggcgcgctggcggtgctggtgctgctgtttatcgaggactggcgcatggggctttccatgttgatcgtcgtgccgctgggcattggctgcttcgcgtccatgttcagcggctataacgagaagttccggcgcacggtcactgcgacgaaggcactcaacgacacggctgtggagtacatcagcggcattgaggtcatcaaggccttcggccagtccaagaccagctacgctaagttcgtctccgccgcaaaagagggcgcggactgcttcatcgactggatgcggggaagtttgttcgggcaggtagccggaatggcgatactcccttcaacgcttctcggcatcctgccggtgggctgcctgctttacatgcgcggtacactgtcggcagaaacatttctggcgatcatcgtgctttcgttcggtgttatgcagccgctgatcaccgccttctcctacaccgacgacatcgcacaggtcacgaccatcgtcggcgaggtagcggaggtgctgtccggcgaagatatgcagcgcccggaaagtgcggaaaagctgcctgcggacaactccatcgagctgaaagatgtccgctttgcctatcacgacaaggaggtactgcacggagtcaatctacacattgccccggggacagtcaatgctcttgtgggcccctccggcagcggaaagtccaccatcgcccggcttatcgcctccctttgggacgtgaaggacggctctatcgagctgggcggcgtggacattcgcacgctgccgctggcggagtgcacaaagcgcatcgcctatgtatcccaggacaactacctctttgacctttctgtcatggacaatattcgcatgggcaaaaagggcgcaaccgacgaggaggtcatcgatgcggcgaaaaaatgcggctgccacgagttcatcatggggcttgaaaacggctatcagaccatatgcggtgcctccggcggacacctctccggcggcgaacggcagcgcatctccattgcccgtgccatgctgaaggatgcacccattgtcattctggacgaggccacctcctacactgacccggagaacgaggcggtcatccagtcggcactggcaaagctggtacggggtaagacgctgctggtcatcgcccaccgcctgtctaccatcgccgatgccgatcagatcattgtcgtgaatcacggcaagatcgaagccaccggcacacagtcggagctgcttgcctcctgcccgctttatcaaaccatgtgggaagcccacatcagcgtcaaagacgatggggaggtggcataatgctcaagacactgaaaaagttttttgccttctgcggggcggacaaccgcaggctgtttatgacatccatctggctgggcgtgatcagcgccatctgctccgccatgcgtattcctgccgctgccatcgtcattcaggcgctactcactaaaaatgtcactatgccgacgctctggacgagcctcggcattatcgtaatctcattgatcattacgattgccatcaatatgaaggccactatgctccagacccgtgcaggctaccgtgcctgcgccaacaagcgaattgagattgccgagcatctgcggtatctgcctatgggctggttcaacgacaacagcctgggtgaggtgacctccgtcaccaccaacaccatggagaacatggccaacattgccacacgggtggtcatggtcacaacgaggggcttcctgacctccggcatcatcgcggtcatgatgttcctgttcgactggcgcatggggcttataacactggtgggactgctgatgttcttcgccgtcaacgctgccatgcagcgggcagagcaatcgctggcgcagcgaaaattcaatgccgacgaacggcttgtgtccaaggtgctggaatatgtgcagggcatcgccgaggtcaagaattttgacctgactcacgactctgccacgcaggtacacggcgctgtggaggaagcccgcaaggcttccttcgccatggagctgccgtctgttctttatatgctggcgcagttcatcgtcaacaagctcaccggcgttgccgtctgcaccgctgccatcggcttttacttcggcggcactatggagcttacaaactgccttttgatgctgatctgctccttcattctctttgagcagctggactcagccgggagcttttcgtccctgttccgttctatcgatattggtgtggacaaggcaaacgcgattctgcgtgtagagcccatggatattgacggggaggaactgtcgccggagcgggaggacattgctctgtctcatgtaaacttctcctacgacagcaagcccattctgcaagatgtgtcgttgacgattccggagaaaaccaccgtcgccatcgtcggcccctcaggaagtggtaaaacaaccctctgcaatcttatggcgaggttctgggatgtgcagtccggcagcgtgcgcctcggcggacgggatgtgcgggagtacagctacgacagcctcatccgcaatttctcctttgtgtttcagcggacctatctgttctcggacaccatcgccaacaatatccgcttcggaaagcccgatgcctccatggaggaggtaaaggctgcagcaaagaaggcgcggtgctgcgactttatcatggcgctgccggacggctttgacactgttatcggcgagggcggtgcaacgctctccggcggcgagcggcagcgcatttccattgcccgggcgattatgaaggacgcaccaatcatcattctggacgaagccactgccaatgttgaccccgaaaatgaaaaggagctgatggaggccgttgcggaattgacccacgataagacggtcatcatgatcgctcaccggctgaaaaccgtgcgcaatgccgacaaaatattcgttgtcgaacacggcgagatcatccagcagggcacgcatgacgagctggttgctgttgacgggctctaccgccgcttcgtggtggagcgcaagcaggccgccgggtggaaggtctgaagaaacacaatctaaaaaatatgaaaagaagctcgtatcagctattgaccgatacgagcttcttcgtttattctctgtttcctgtaatgtaatagtcgcagaattctccgccgtttgccaacgcctgctttctgtgcagcacgccgtgctggagtgtgatcatcacctcgtccaactcgcagaacagcggcatcaactcggaaacgcccagcttttccgcataggcgcagatggggcagcgggtgatgcggtagtagcaagctccttcatgaggctgtccctcaaagtccactttgaacgatgtcggatattgtttttccttttccggcgtgtaccacttgacatacttcacgatgctctttttgttctctgccttgcccttatcggtgttcaggtcggttttcgcaaaataccacttgatgtggtaaagcgaacgccgcatcatctcctgcaccgtctccggggggatcttcttcccgcttgctatgtaaggtgcgacaaaggcgagtgcaaacagctcgttgtatgccattgggttgtcgtcaccaatgtcggcagctttcccgaccagttcacgatagacttttttgctctttttcataatgtcggcggcatattccctgccgtacttctctgccagaacctttttcatcgggcttttgaacatccagaaataaaaatcgttgtatttcatatcacttttcctcccgtgatttatttacaggcttaaggaacgcagcccagccgccgaagtgatagaccatcgtcgcgtccatatatagcccggcagtcttgcggtcggtacattccgccatgctccggcggtagctgtcaaactgtgcggagatcagctttccatgatgccgcgccgattactttcttcccaccagcaatgttgagccgtgaagcatcaggtgtccggcttccttcgatgtcataaagctgccgtcggccgtgtccatcagctccacgcgctcatagcccatgtccatgagcttttggacaaacgcctgcatatcgccgtatctgcggggtgacatcaggtcatggatagcaaatgttccgccctttttcagcacgcgcagcgtttccagcagaagctgctgcttgtcctttcccgtgatattatgatagacatagttgctggtcaccgcgtcgaagctctcgtcggggaaatccagcttcacggcgtttccacgccggaacgaagcgtttttcacgccctccgcagcggcgtttttttcgcacagcggcaggctgaaggaggcgtattccttgccccagcggtcgataccgatcatttttccctggggattgcgctttgcgcaggcaatggtcagcacaccgctgccgcagccgatgtccagtcccacaccgccctccggcagcgtgatatgctccgccgtgccgtcaatgatctgctttgagagcttgcgctcgccgtcataggaaaagacccgataggcatacacgcaccactgggtgtactttgcacaaacgacaaaggcaatgccgaacaccactcccagcacgacgcgcagctttccgctcacacagacgccgaatacgccaaaaaccagcagcagcgtaaaggacagcaccgttcccgcgatgagcgaaaccagcattcccttgggaatccagtttttgtagtcaggcttcatattcaagactcctttttattgagtgtgacttctctcataagctgcagtcgcgatgcaccagatcacgatggcgctgttcgtgctgctctggctcattacggacatccatgtggctgtcggcacctgcatggcctgtgcaatatcaggaacagcaaccagcagaagattccatgtgaccggatggaaaacgagcatccacctgggataacgggttttaccgacaagcagcatcacaaaatggataccaaaaaccaatagcatcggaacatacatggggaggattgcggggagcatgtcatcctgataggctgtgaccgctgtgatggcggcctccgctccgatacgcggccccagataggtggaaaaccacgccagagtagccgcccagagatggatcgacaaggctaccacaaccgtaaataacccgcaaaaatactggatagcttttgttctcgtataccttgcgtcaatatccgtattcagtgccgtcaccatgaaggagtagaggaagcacccaagcgctcccattccgacgaccaatgcaggcttccacaaggcgtaggcgccggacagataacaggctctgttgaatattccggtgtccgtcttctgcagcggaacgcatcccagcagccaatcgccggcagccatcaatatcccgccgattgcgccaagaatatagcattggataaacggtttcttttcttccttcttcaacttgttcattcctgtgcatctattttatggttttcatgcagaaatcgcagcggtcatttccacgccccagtgtcatacttctctcccagatcagcttcggatgaagaccggtgtagctgatgtcgtcgctgtcgcaaaagcagcagcacagctcaggacatccgtatgccacgcaggtgtcatgatatggacatttcatcatatccacacgccatatgccgttgccggcctgcagctcttttggggcaaagcccgccgccgggccgaagacgctccgcgtggatttgacgaaaacgccgggaacaaggcggtaaagccccggtatgtgcagcagggcggcaagctgtttgtggctcgttctcgccaagcgctccacatagccgtgcacggtttgcagcgcctcctctttcggcatgacccgctgtaaggtctcgtaggccgcaatgcccggcaagatttgccgtttgaggtggtattgcttctccttgcttgcatctgcattttcagccagcagcacattcaaccgcgtatcaaaaaaggcattcagctccttggcctgcgagggaaagcactgcgccgcagtctctcgaaaatcacgggagagataggtttcctttatcgtcctgcctccgtcccagctttcatgaagcccttctttttatacccgcagtcgcagtatgggccgccggaggcgagcgtgtactgccgcacaaagtcggtcacgccgcccgcctcgctcatagtgtagtccagacggcacagcgcgggagtgaggtcatatagtcccagctttttcatcagcacacagatgccgcatttggtgaagcgtccctcgtagccgctgccgtcggggtattcgtaaaactccatattccacgagtaggggttgcggtcagcggctctcagcgcggcggtggctttcataccggcaatgtccttttcggtgaatttgctctttccgctcatttggcagaaccatttcatgggctttgtcatcatggattttgcgtaatactccgtcagccactccacatccggacgctccggcatggagagaacgaacgcgccgatcattgcgcagttgacgatattcatcttgaaccggtcgcctttttcaaattcgggcagctcggagatgatctccctgtatttcggctttgcttttttcgtgatggtttttgccgtatcgacatcatagccgaatacaaccgtcagctgtttttggaatgagcctgcaaacatcgtccacatgccgaaagacattccaaaataggtcactttttgtccctccaatcgcatatcacgcgggtcatgcggcggtcaatgtcaatgcgagccgttttacactccctgggatatttcttcgcagcgctgaacgccagcttgacaaacagtgccgagccgacgggaagcatggtcgtgagcataccgtcggggaaaacaaaatgcgtgccgtgctcatatacgaccgcctcgacttcgcaggagtgcggtttctccgcaaggcgtttttccatgcggcggatatattttgcggtgtcccaaagtgcgtcgtcctctgcgccgacaagaaacagcttgccgcagatattctcgacttttatgaattcctcctcggtaatcgggtgcgccgcttcagagtcgtcaaacagcttgcgggaggcaaccatattaccggtgcgtttggactcctccgagatcatatgccaatagtcggggtgcttacagcaaaacggcatatagggtagtggtttacctttgtaggaaaagagcgattcgccctcgatcggccattccttacagccgtcctttttgccctgcatgaaaccctgccacacgaagtcgctgggggtcattgcgatggtcagagagatatcatcaaatagtgaagccgccgtcagggcgagcgtgccggtcgttgatgctcccgcaatgcctattttttcgttgccgtgtaatttgagccatgccattgctttttcgatgcgttcaagaggataattgtgatgaccgtagtccttttttgcaggcgacatagtcaaaatgttcacgccgaggcgaagtagccacttcaccgcagagcgcgccatataatcctcggggtcgtcgccgagcatggcgatgacggcgcagtccgagccgtccttgcatgcccaatacgcgccgtaaaagccatcactttcaacatcaaagtggatgtgtttcattcaaaacgcctctttcaaaagttgatctttacaatctgcatcttcatcattccgtcaccgaccctggcgagaaaacggaaaaagccgctgacggacgggtccttcaaatcattgtagcccagcatatagccccggctggtgacctgcaagcgactgtcccacagggaaagctcactttttgcgtctgaaaccgcaaaatacgcgcccacatccttgatcttcgcgctcttgagccatgtcttggcaatcatctttaccgccgtccggttcgctgcgtcaaataccagcacgccgccgggaaaagcgtctgccattttttgaatcaaagccttgacctgttcggtcaaaaagtagtagaacacgccggaggcaaagaacaccgcgccgccggaggcatcgatttgggggaaccactcggtattgttcaaatcacaagggatgctttcctcccgctttccggcgggcagcagttcattgcgcacggcgatcacatcgggaaagtccagattgtaaattttgcagctgccgttatcgcagcttctccctgtgctgtccagtccgcagcccagattgaccaccgccgcattggggtgagatttcagataatcccgcgcctcaaaagcaaggtcattctgccgcatggccacctccagtgaaccgaaacgctgcatgaggctgcgggagtttttctccgcctctgaaaagtcatagtcgatctcaccgatcagctgcaccgccgtttcatcccgataaagattcggatacagctctgagcagaccttcctcgcatacagcggaatgatcagcgtctcctgcacggtgtttttctcaattttgtatttcataggtacatctcactttctgataaatggcagttccggcatacagtcacgctcggcgatatatgccagcatttcggcgaacccctttggatcgcgaatctgatattgcatatgctcgtatccctcaaacacgggataatggccgcaggggtaggcttccatcaccgcctgacggtatttgaaatgatcttctatgctgccaaactcaaaatagctgtgcttttgcagttcctcgggaagggacggaaagggcttatcctccaggctgtccgaaatctgccgtcgcaaatttgtataggtcagattttcccctgcggctataaaatacggctttatggaatcgtcgtcacaccacagtatctttttcagcgtaccgcccttcgaccaatataggctcttgatggcaaaatacagaaacggcgtcatgatacggcgcgtgccctttccgatttgggcgaactgcccgccgtcaaagaaagcgtgctccacgggcagcttcgtctgcgtcagaaacgccatggcaaggtctgcaccgatggaagaagcgaccaccatcgccagccgctccactccctgtcgatgcagaaagtcctccacctgccgtatttcgtccagcttgctgacatatttctgcccctcgcagtaaacggtggaggtgggcagaatgcagaaataccgatcctgcaaaaacctcgcaatcggttcgctgcttgcgcctgtcacgcccatagcatgaaagaacagcacggcaggattcctcctgtcgccatatgtttgaaacagcatttctatcgcctcagctttccataaaaagcatcatgattgccgccagtgctgccgaaatgaccgccatgcccaccgtgccgaacagccactttttgcccttatccttggctgtaatgtagggtttcaggtcttccgttcccggaatttcccatgcgttcgtatgtcctacccaatagccgtcaacccaaaatcggtctatgagattcataacggacagtatgaccagcagctgccaaaagccctgaacgaagccctttgcgccgttgagcgcatagacgcagaccagcacataggcgatgtagccggggacgcagacagctttgaaaatcaaagcatttcgcttgattttcgcgtgtgttgtaagtcccagcgttacgcaccgctcctgcacctccgggctgtaaagatgcaccatgcccaccgcgcccttgcggataccgatggcgcaaaccaaaatgagcagaacgcccagcccgatgccttccaaaatcacctgtaaaagcattaccgattcctcctgaagcccgcctcatctcgatattcgggatgttcctttaagtatgggtctttatcgccgcagatggtgtagtcgcactggtagccgtccacgcaggtagttgtccgcacgagcttggcatgcagcagctccatggacgcatagtccacattgcacagggcgggcataatgtccgtaaatccgaactgcttggcaaattccgccgccggacacgccgtaaattcataatagatgggcttgccgccttcgtaaggcgcaacattcatctcgtaatcgtgccatgcatcgcagcgctttttggcggtggtgaatgcccgatacatcagccttttccaaaacggcttattgatgtcaacgaagcgcagcttccggaacgccggcaggatcagattctcttcgatctcttccatttcgcggaatgtgaccacatcccggcacacatcgtaaaagcacatgatggcgatgcagtcgtaggtgccgcctgcgccgttgtgaaaattcttcttgccgccgaggtctgtgcgccagtcggaaagaagctctgcgtatctcagctgcacctgctcccagaccgcctcgcgctccgcctccggatagtgcagggcgattttcgccagaatttcctttttgcagggcttggaatataagacgtgacagctgcggtcaaattgcaattcgctgtccttcatcttcccacgcctttcagaaaaccgctctttgcattttcttcggtatcgtccgattcgtcgtaggcatcatagggcgccgacgggtcgtgtacccgttttttgaatggcgaacagagcttgtccttatgggcaaaagcaaattccaaattgtccgtccatcccgtgtgaccggtgatgaaatacggatgcaaaccgcgtgcgcgcagcttacgctccagctccgcaagtgactgcacagccagcttattgtcctctgccaacgaggaaatgaagctatatccgccatctgcgccgaaccacagcgtgtcaccggtaaacaaatactcatcgtcaatgaggtagaccatatgaccccaggtatgaccgggaacaaggaagcattcgattttgatgccgtcaatgtcgaaaacctcgccgtcatgcagcagcaccttttcgttgttgatcgtgacctgcggtaatttatagagatgatagatcacttttcgccgcacctcgccggtgagataccggttctcaacctcgcctatgtacagctttgcgtcccggaacaatcccggactgtcggactccaccgcgcccacatggtcggtgtcctgatgggtgataaggatatggcgtatcgacttcggatcaatgccgagccagcccattttttcggcaaggcggtcgtagttgtagcccgcatcgatcataatggtcgtatcgcctttgcggtagaagaagatgttggccacccactcccgcacgcaggccacatggtcgtcgatccagccggtattcagcggcttgaagatttccttgccgcggtacattttgctcatttcttttttctgaaattcggttgctttctttgacatattatcgctccctattttgattttcggcagacaaaccacgccatgcttttcaggtttcccatgtccacatccgtatacattccatccagccgcgctttcagactggaaaccgtctcatagggcggtgtgaagaagcccgccttttcataaatgtgccggataaaccagtctgtccgcttctgttcgtccctcacatagaagcagccgcagaatgtcccgccgggtctcaaaacccggaaaacctcccgataggcggcttccttgtccggaaaagcatgaaagccgttcagcgacaacacaatatcaaacgcaccgtccgcatagggaagtgcgcccacatcaccctgccgaaaggttacgtttttcaggtgcaggcggtcggccttttcctgcgcctgtcccatcatatccgccgagtaatctagacaggtgatgtctgcttttggcagcgtctgataaaccggcatggtcaggatacccgtccctaccggcacctccagcagcttgccagagaaatcatctggaatacccgacagtgctttttcaagataagcatcacattccgccttgttcatatcccacaccagacggcacaccgctttcccgctcagggtagagcaggtgatcatgccgtcataaaaattgttgccgcctgtcagtcggtacgcaccgcgaatgacttcttttcgttccatgggtttccctccgtatttcaatcatcacacgaccgtttccgatctcattttttcaaaatgtccacgattttcgcaaagtcctcctttgcctccttgaagatcggcagcatacagtagcaatgcaccatcttcgggcgggcagacaccgtacaggggacatttgcccgtttgcaggcttcctcaaagtccggcaaagcgccgtagagcacctcgtcggcagaatagaagaagtgaatatcgcccacgccggtaaaatctccccgagagccggagagcatatagtccggcacattctcgcagccgtgccgcatgaacttctccaccgtcaccataaaggcataatcgatggaaacatccctttcattgagcacccgcatccgcgccttttccgcatcgttccacggcacctcaccgggggatacggcgacaatgtgcctcggatgcggcagcggtttgggctgcgcgttgttgtgcgccgcaatgcccagcgccagcgcaccgccggaggaaaagccacaagtactgacatttccgccgccgtacagtgcaatcatttttcgataacattcgtacaccatcgcgtaggtttcagtaatgcagtgttccatgcagagcgggtaaaacggaaaccacacatcacagccggtctcgcggcagagcttgcgcatcacaggcaggtcgcccttatcggggccgatcaccatgccgccgccaaagaaatagagaatcgcgcgctcggacggcttcggatgctctcgcacgatcaggcagggaaagccgtttaccgcgatcgtttcataatatgccttgcggtcggtgggcgtaaaaacgccacgatgccggttctgcttttcaatttcctttcgcagtgcatcctccggcaaggcgaacgcctttttcgcgccggagagcttgtatacgctgcgtaagatagatgcaaagatactcatgatttagccccctcatttccacgccgtaatgcagagccagcttttctttttgtgtatctgcacatcgtgaaagcccgcctgctccagatacatcttcagctcggcgtccttgtagatggtcatgccgccgatgatctccgtccacttctcatccttgtccgagtcgccattgctctcgttgcagatgagcaatgtcccgccgggcttcagcacccggtaaacctcccggaagcactgcggcagatcgggccagaaatagacggtttcaaaggccgttaccgcatcgaaccagtcgcctgcaaagatcatatccgccacgctgccttgcagaacggtgcagcggccctccgctatggcggcctcgttgacctttttggatttctccacactgacgggggaatagtcaatgcccttgacaataccctccgggcattttttcagaagtctcttgatgttcgcccctccgccgcagccgcagtccagcaccttggcatccagagtaagcttcaaaaagcgaagtccccaccgtgccacaggactgtgccccaggttcatcatggcgaccatgattttcccgccaagccccacaggctttctggtgttctcaaaaaatgacatcttatcacacctccgatttcacacattccgcataggtcagcgggaaggacgccttcagaacagcgctcttccgcaccgcccagccgttttgccgtaggaaacgcaggtattccgcgctcgtccacttgctgcggagagggaagcctgccaacttcatgaaaaaggctttgaccttgccggaaaacgagtttcccgcatgggtaaaggtgggcgcgatgagcacaccgtcgtccttcatcacccggcggatctcggcaagagctttctccggctgcggcacgatatgcagcgcattggacgcgatcaccacatcaaaggacttatccgcatagggcaggcggaacatatcctgcacggagaagtacagcttggcagagcgggtatcccgctttgcctcggcgatcatctctgcggaggcgtccgtcgcctcgatgtgcgccgccgcgtttacgatgtgttttgcaatcaatcccgtgccggtagcaagctccaacaccgtcttggcttttacaaccggccggatcagctcatacatctcgtcatacgccgcccgatcctttcgcataaagcggtcgtaacgtccggcatttttgtcccagaaattcttgtgtccctgcatcgctatcattcctttcaatgttagattaacctaaccgacgcgtgcacccggacggttagatggtgctaaccattgtaccttggaaaagccgcatctctgcggccttccgcttatttaaataactccctgcaagcgccgtacaccagcgtttccagcacctgcgggtacagtcctcctatttgctccttgtgagaaacggtgaggatcagtccccgcaccgtggcggcagccaaagagatgccgcgactcggcacaaggtcatatttttccaagagctgacgaatatgcgtttcgtcatcgtggtaatgcacgtttttgacatcctccggcagtctctgcaaaagcagcttcgcatcgttttcaatgaaaaccatgtcgccggtatcggacagccgccggcaaacggcaagaaccgcctttgccgcacgctccgatgttggcaggccgccatttctgtgcaacgcctggtcagccactccgtaaagctcggagtgaatgttctccaaaaccgcgaagaaggccatctccttggattcgaagaatttataaaatgagccttttgcgataccgacagcctttgtcagttgatccactgaggttttcttcatccccagcgtgacagcacaatgtctcgtttccttcagcaacgccttgcggagctgctcagtctcgtaatcggtaaaagccaaggccgcaccctccctgaaatatgaccgtttcggttcttccggtcatattataccgcgcttctttctggtttgcaaggggtgtggagaaaaaaacgctaatcaaaaggagtgcagtgttgcagaaagagacgacggaattccggtaatcgttgaaagaaaagtcgcacagaccgaatagccatccgcatcagcatacagcccgtgaagaagatatgattcgtgaagctgtgcggcagtcttactttcgctacggctgggaaggtgcatatatggcggcaaaggaaggcggttacagcagaagctacagcggattcatctatgccgccaaaagactcggactgtgcggaggcaagcaggaaaagccaaacatacgcaagagtgaccgccggtattccgagattcttgttccgggagaaaaagtgcaggtagacgttaaagaagtgccgtataacttcctgaaaggcgcagcaaaacgagacggaaagcacttataccgatggacagccatagacgaatgcaccagaatacgttttatttacgggtttgaggagcatacaccggaaaactcggtaaagttcttcaaaatgcttcaaaaaatatttccgttctagattcagacaatccagacggataacgggacggagtttacatacaagtacatcagcgatacggaactctgtccgtttgacattgctttgaagaacgccggtgtgcagcacaaggtgattccacccagaacgccttggcacaacggcaaggtagagcggagtcatcgaaacgatcagcgctatttttacaactgggaaaagtttgcaagtgtagaagatctaaaccgaaagctcaaagatcatttgcactggagcaacagaaagcccatgcgcacgctgggcggcaaaagccctcttgatctcctccgtgaaattctttctaacgcctgattcttttctatcccactctttttatctctttgtgggtcatatctatttacaacgcagaagatatgatatataattcggacacggatactagctttttagaattccaatctcgtgtcagagatacgttcttgcgttatgccacaaaatgaaaatttgtaattattgatgcaaaacaagaaaaagctcaaatgttgagcgaactagttcagcaacttaaaaaagtctataaataatggagatagaaaaccatgcgaaacaacaataagcagtggcacagacattatggagtatatggtgtttgtgtgaataaaagaaaggaactgttagttattgaaaaaaacggcggaccatattctggactgtgggatcttcctggtggatcctttgaaaatcctgaaagcatatcagaatgcttaatccgagaaatagaagaagaaaccggattgtgtgtttctatttcagaaaatttgagtactttcgatatattgacaaactccccctataacggtttcgattatacgcatcatattgctatgacgtattgtattgacatcttaagtgatagcgagaaagaaattagtgagtatgtaaacgatagatcaggctcggtcgaaaatgactctctaggttacaagtggatatctatcgatagtttttgcgagaaaaatgcttcaccactagtaataaaggtgtgtgaacttattaacaacaaaaagtcctttgaaataattgagtacgtaatctaatactttcagaggtaacagtgttattttgttgacacatggattctgcaccatgcgtgcatggaatcctttcattctattctcaagcgtgaatggctcaatcgctttaaaattcgcgattacaagcaggtataccggttgattttcaaatatctggaagctttttacaacacgaaacgaattcacagtcattgcgactatatgtcaccagatgaattcgagcaagtatataaaagagcacacattaaggcggagctgcgggcaggttgaatttgggagaaatttctcattttaacttgtactaaatcttgacataggaccaaagcagggcttttcttcctttgagagcgctaataacctgatctccatgtttgtgttcttctttaactttgttcgtcctcattccgctttgaacgggcttacacccgcgcaagtcgccggtctcagtttacccacccgcaaaaaacgagattttcctctcgtcgcttgatattttcctgtgttttgtccctcgctctttcatttttactttacggtgcctttggtaacttcattatactgaatacaaaacgaaaagacaaatgtgtggatttaagaaacagaaaaaggctctgaccttttacagtcaaagcctcatctgccactgcaatgccttagttttattaagttttatcatactgccttatcaaacctcagcatttcctgcagcgtttttattatggctctttcctgcggttttgaatgcggcgtatgagcagcgccgagccgccgacggcgagcacgccccagccaaagaggagcgatgcacggacaatccatttcccggttgcgttcttttgcttctcgccatgaatgtgaagctttgcgtttccgccttccccgcactgcacggtaaatgtcatgctctcttcggcggtaagcgtaccgatataaatctcggcaaacccgagtgcagcactgtcccccgagaaaagcatcacactttgcccattttgcacacgcagaagctttacttcaccttggctttcttctgccgtgagatataactcaagcggcacggtacattcgtttttgaatacaagactgaggggcacgccgctttcggctatgacagtcttttctaaacggtctccgctgaaaaacaccggcagcaaaaacgccgtgatgaacgccaggacccgaaccgaaaacatgcgcacccctcctcggccgccgggcgcgcatcaccatacgcgccgcctgtaagagggcaccgacgggcctttttcttcatgtatatgcgtgtgcgccggcgttatatacgcacggtaccgcatgacgatctccgcatgcctgccgaacagcttttccaaaagcgtcaggacggtctttttctcttcgcgatagtgctttccgtgtttcatcgttttcctatgccctttccgtaaattttgtgatctctacggataaaataccacgacacagcgaaatattttgtcattcccatcatgcggaaatcttgaactttccacgcatttgtggtaaaataaatcggttattttgaatttgtgaagaaacagaggttatcatcttggccgattttagaaatgagattgaaaaacggcgcacgttcgcgattatttcgcacccggacgccggtaaaacgacactgacggaaaagttccttctgtacggcggcgccattcagctggccggtgcggtcaagggcaaaaagaatgcgcgccacgccgtttccgactggatggaaattgaaaagcagcgtggtatctccgtcacctcttctgttatgcagttccagtatgagggctactgcatcaatattttggacaccccgggccaccaggacttctctgaagacacgtaccgcacgctgatggcggcagactccgccgtgatggtcattgacgcttcaaagggcgttgaggcacagacgagaaagctttttaaggtctgcgtcatgcgcgatattccgattttcacgttcatcaacaagatggaccgcgacgcgcagagcccgtatgatcttttggacgagatcgaaaaagagctcggcatcggcacctacccgatgaactggccgattggctccggtgtggacttcaagggcgtttacgaccgcgaaaagtccgaaattctcgcgtttgaaggagacaaagagctgcgcggtcaacacgaagtcaaagcgcacgagatcgatctgaacgacgcggcacttgagaccattctcggcgaaagcctgtgccagacgctgcgcgatgacgtagagcttctggacggcgcgggctatgaatttgaccttgaaaaagtgcgtcatggcaagctctcccccgtgttcttcggctccgctttgacaaacttcggcgtggagccgtttctcgagagctttctgcgtatgacgacctccccgctgccgcgccaaacctcggagggtgtggttgacccgttcagcaaggatttttctgcgttcgtcttcaaaattcaggcgaacatgaacaaggcgcaccgcgaccgcattgcattcatgcgcatttgcagcggcaagtttgaaaaaggcatggaggtcacccatgtgcagggcggtcgcaagatcaagctttcgcagccgcagcagatgatggcgcagagccgcgaaatcattgacgaggcgtatgcgggcgacatcatcggtgtgttcgacccgggcatcttctccatcggcgacacgatctgcacgggtaaaaaagtgcaatttgaaggcattccaacgttcgcgccggagtttttctgccgcgtgcagcaaaaggacacgatgaagcgcaagcagttcgtcaagggcactacacagattgcacaggaaggcgccattcagatcttccaggagatcgcctccggcatggaggaagtcattgtcggcgttgtgggtacactgcagtttgacgtattcaagtaccgcatggaaaacgagtacaacgttgaaattcgcatggaaacgctgccgtactcactcatccgatggatcgacacgccggacgtggacctcaaaaagctgaacctcacgtccgacacaaaaaaggtgcaggacattcgcggacgttaccttttgcttttctcaaatgagtggagcatccgctgggcgctggagcacaacgaaggcctggagctttccgagttcagccgctaaattttataaaaagcaacgctctgtatggcttttgtgccgtacagagcgttgttgttatgtattgctgcttgatttttgcttgtggctgtccgcgacgaactctttcggcgtcatgccggtgcagcgcttaaagcgtccgcagaacgaggcggaatccgaaaatccgcaggaaagcgccgtttcactgacagtatatgtacccgccagcagcatttttttcgccgcattgatgcgcacctgcatcaaatattgcttcggcgacatgctttcggaagcagagaaaatgcggtagagatacgtgcggtctatgccgatatgccgcgcgaggtcgctgatctgaatgggatagccgtagttgcttttgatgtagccgatggccttattcacatactcatgctcgcgggtgtacgcgccgccgtgtgcggattcctccaaaacggacatcgcgccgtaaaagccgctcatcactttaaacaagctgcctttgttgaattcgtcaatcatctcgtgcatgtagcggatgaactcgtcgccgttttcaagctttgttgtgtattggctgacaaggcccgtgcggcgcaggatctccagtacatcaaagccgtcgaatgcgacccacatgtactcccacgggtcttcgcgatcggcaatgtaatatgtgcgctcacccgggcggatgaggaagcactcgtttgcgtgcagcgtgtaggtttcttctccgacggtatacgtacccttgccggagatgacgtagtgcagcaaatactgattgcgcacggccggaccccagaaatgcccgccctcacatttttcgtaaccgcagtaatacacggtaacagagccgccgttattcaaattttccgctctatgctttatggtgttcatacccgtccctacctttgtaattccctattcagtatagcacacttaaacacaaaatacaacaaaatcacaacgaaaagaaacaaaaaatatagaatctgcacactatgcaccgtataatgaatacaagaatcgtttttatggaaggagttacagattatgccaaaaattacattcatgggcgcgggcagcaccgtttttgcacgcaatgtgctcggcgactgcatgtgcacgccctctctgtgtgagagcgagatcgctctctatgatatcgatgccgagcgtttggaagagtcttacatcattctcagcgctatcaacaagaatacgaacggcggcaaggcgacactgaagacctattgcggcgttgagaaccgcaaagaagcgctgcgcggtgcggacttcgtcgtaaacgccattcaagtcggcttctacgacccgtgcacaatcatcgatttcgaggtgccgaagaagtacggtctgcgccagacgattgccgatacgatgggcattggcggcatcatgcgtgcactgcgcaccattcctgttttggaagattttgcccgcgacatggaagaagtttgcccgaacgcatggttcctcaattacacaaacccgatggcaatgctttccggctacatgcagcgctatacgaacgtaaagaccgtcggtctctgccacagcgtgcaggtctgctctaaggagctcctaaaggcccttggcatggaagataaggttgaaggccgccgcgagctcatcgccggcatcaaccacatgggctggcttttgaagattgaagacaaggacggcaacgacctctaccccgagattaagcgccgcgccgcagaaaagaatgcgaccgaaaagcacaaagatatggtgcgctatgagtacattcgccgcctcggctactactgcaccgaatccagcgagcacaacgcggaatacaatccgctcttcatcaagtcccgttacccggagctcattgaacagttcaacattccgctggacgaatacccgcgccgctgcatcaaccagatcaagggctggaaggaagaaaaagaaagcattttgaaggacggcaaagtggagcacacccgttccagcgaatatgcctcctacattatggaagctatggtcaccggcaacccgtataagatcggcggcaacgtactgaacaccggccttatcgataacctgcccgccgatgcgtgcgttgaggtaccgtgccttgtggacaagatgggcgtaaatccgtgccacgttggccgcctgccggtacagcttgccgcaatgaacatgacgaacatcaacgcacagctgatgacaatcgaagcggcccgcaccagaaagcgcgaggatatctaccgcgccgctatgctggatccgcacaccgcagccgagctttccatcgacgacatcgtgaagatgtgcgacgacctcatcgaggcacacggcgattacatggcgatgtacaaataactcaacgttttcctccattgatacttctatagaaagcaatacacccgcaggaacgaaccgcctgcgggtgtattgctttctatccaattttactcgccgtcttccccgctgctttccgcgctgacgaggatgcccacaacggcgccgtacgcgagcgcatcgccggggctgtcggactgataaccgatgacgcggccgatctttgtatcttcgctgtactgcgccacctgcaccggctcaaagcccagcgctttcagctttgtcatggcttcgtcagccatcatatcggaaatatccggcagcggacgcagctgagggcctttgcatacagcaatctttaccgtgctgccggcctcaataatctcacccgcgagcggatattgcctggtgatttgcccctccggcaatgtatcgctgaatgtttcctcacaaatttcaagctcgaatttatattttttgtccttttctgttaaggagagcagcttgtcgtaatccataccgacaaggttcggcacctcaagtgtttgcttttcttcgacagcgcccggacctttgatggacgcaacgatgctttgcggcgagaatgggctgtctttgaaccacacgctcgtcacggcaaagatgacgacgagtgtaaacacgaatgacgcgacaagccacagaaaagtaggcacgcgacgcttgctcggcgtgcggccggaaccgctcggcagcgagcgcaccgtttcggtctcgacgaatttttccacaacggtcggctcagcggcaagctctgcggaaaagcgcgagaaacttgacgtgcggcgagagggatcaacctgcaggccgtttgcaatagccggaataacctgctccggcagctgctttaggatatttttggagatcatcaggcgcgggtcctgcttgcgcttcggcgcttccatgggtgcggcgcccgcgagcgcaaacaacaacgatgcgcacaggccgtaaacgtccgtgacctcatcacagattttcgttttggagtactgctccagcgcccagcagccggggaaaatatcctcaatgaggtcggtgccggcacggcgcacagactgtatgtcaaagcccgtaacgatcattttatcgtcttttgtgatgcgcagcgtgttcggcgagataccgagatgctcgacattctgtgcatgaatggcgccgagcgtgtgaatgaccgggtaaaagaactgttcgcactgcgcccagcttagaacgccgtgctcctccacgtactgtcgcagggaaacggactctgtgaacgagaacacgatgtactgcgtgttgttctgcgaaaacgtatcgatggcgtgctgaatgtgttttgtatcggaaacacgcaggagcttctgcgcatagcgctcgaactcgcttaaatagtcgctgaacttgagttctgccccgctgaccggcagtacggacgcgccggtctcgccgcgcacagcgatggtatgtggataaaactcacgcacctctaccttctgcgccgttttggcttccaacgcggcgtatgtaatgcccgcgccgttgacgtgcacggcctgtcccacaaggtatttttcgccgagcaatgtgccgtacggcagcgcgtttttcacctgatcgccgttgtgccagccgcagtgcggacaggtattgctgctgtcctccattgcttcaaagcatctcatgcaatataatttgttctctcccatgcgctcagcttcctctcgatctccgcttcggaatgcggtgcatttttatacaacatccccgaaaaattcttttcactgaacacagtataccacattttgcctgtgctttcaaggtgtgtacgcacccgaaagcgcgaagaaactgtcggaaagctgcaagggccgcaattttaataaagttgtaaggaaaattttgcttttcttttccggcatatattcgggcaaaaaaagaacgctccagtcataggagcgttctctgtaattcgatttaagctgaaattaagccttgtcgatggaaccgaagagctccatcttttccttaacggtagccttaatcgcctcaaagcccggagcgaggagctttctcgggtcgaagcccttgccctcgagatccttgcctgcttcgatgtactttctcgtagcatctgcgaaggagagctggcactcggtgttaacgttgattttggaaacgccaagggagattgcttccttgatcatgtcggccgggatgcccgtaccgccatggagaacgagcggcatggtgccggtgagcttctgaatctcagcgagaacgtcgaagttcaggcccttccagtttgccgggtacttgccgtggatgttgccgatgcctgctgcgagcatgtcgacgccgaggtcagcaatcattttgcattccttcgggtctgcaacttcgccgccgccgataacgccgtcttcctcgccgccgattgcgccgacctcagcctcaacggagatgccctttgcatgagcgatgccgatgagctcggtggtctttgcgatgttctcttcgatcggatagtgggaaccgtcgaacatgatggaagagaagcctgcttcgatgcaagccttagcgccttcgtaggagccgtggtcgaggtgcagagcaaccggaaccgtgatcttcagggtctccagcatgccgtttaccatgccaactacggtgttgtagccgcacatgtacttgcctgcgccctcggaaacaccgaggatgaccggagagttgttctcctgagctgtgagcaggatagcctttgtccattcgaggttattgatgttgaactgaccgacagcgtatttgcctgccttagccttgtccagcatttcctttgcagatactaacataaattcagcctccatgatccatgaaaggatttttatttctttgtatattatagaatatacagcgcaaaaaatcaaccctatttgaaaatatcgggctgtttcgcgttattttacaaaaaaagtaagaccttttcgcgatttcttacgacaaggtcttacaaaataccgtttatattcagttatcggaagacttgcgctggagcaggacggcggcgatgatgatcgcgcccttgaaggcttcgcgcaggaacggcggaacgccgaggagattgaggaggttgttcataacggcgatgatgagcataccgaatacagtacccacaacggagcccttgccgccggacatgctggtgccgccgacgatgaccgccgcgatggaatcgagctcataaccgctgccggcgtttgccgggtccatagcgccgatgcgggagacttgcaatacggccgcgatagcgacaaccgcgcccatcagcgcatatacgccgagctttacacgattgacgttgatgccggaaagacgggacgtcttctcgttggagccgaccgcgaacacgtggcggccgaacacggtcttcttagagacgatgtacagcacgagcgcgatgaggagccaatagaggatcggcataaacatctggccgccgaccttcacacgggcaatctgctggaaacccgtcggaaccttcggcgaactggactgcatgaactgctgcgtcacgctgcgcaggatcttcatggcaccgagcgttgcgatgaacggcggaatcttgcccgcagtgaccatgaggccgttgaggccgccgaaaatgatgccggccgcgatggagatcagaatggcaactatgtacgcaggtgcgccggtaaggccgatcgcgccgagccaaccgccgtttgcggcgtcgataagcgtcatggtaatggcgccgaccgcgacgagcgtggagccgacggcaagatcaatgccgccggagatgatgacgaacgtcatgccgagcgcgatgataccaacgctggagttgttacggagaatgttcatccagttgttaatccatgcgccgaaccattcgccgaagcttgcatagttgaagccgagcgcgagcgtctgcagaatgaccatgacgatcagtgcaatgcctgtggaaaacagcgcattattcttccaattatcgcggaaccatgcgccaaagccctttttgtttgttttttcgttcattatacctgtccccctgttgcaaggcgcatgatggcctgctcattcatttcatcgccgacaagctcgccctgcacgctgccgtggaacatcacgacggtgcggtcgcacacgcggataatctcctgggcctcgctggaaagcacaatgacggcgacgcccgcctctgcgagcttcaggataatatcgtagatttcctccttagcacctacgtccacgccctgtgtggggttatcgaacacaagcacctttgggtttgcatccagccactttgccagcaccaccttctgctggttgccgccggaaaggctgccgatgagatcttttgcggagccgagcttgatgtgcagctctttttcgagatcatcaaaatccttttcaatcttcttcgagtgcaaaaagcccatcttgctgtctctgggccatgtgacgaccgtgccgttttcaagaatactcatatccttgatgatgccgttttccttgcggttgcgcggcacatagccgacgccggccttgagcgcctgccccgtagtgcggatacgcacgggcttgccctcgacttctaccgtgccggaagccccgtgtattgcgccgaaaaccgtctgaaacagctcacttctgccgtcgcccaaaaggcccgtgaaaccgagcacctcgccggcgtgcacttcaaagctgacgtttctgaaatgcggctccaacgtcatacccttgccgcttaaaataacatcaccaatctttttctcacggcggagcgactgtgtgcgcacatcgtggccgaccatgtcgcgcgccagcatatcgacagaggtctccgagacaaggccggaggaaaccatattgccgtctcgcagcactgtgtagcgtgtgcagatctccatgacctcgcgcagcttatgagaaatgaacacaatacctacgccgctctttctcagcgtattcatcatatcgaacacacggcgaatttccggctccgtaagcgaagtggtcggctcgtccatgatgatgatggaagcctccatcaaaagtgcgcgggcaatctcgacaatctgcttataggaagcatcgaggtcgcgcaccatgatacgcgggtcgaggtcaaggtccatttttttgaaaacttcgttcgttttcgcaatcatcgcggcggaatccagaaaacggttcttcttccgcagctcgtggccgataaacatattctcgtaaatggcaagatcatttacaaggtttaattcctgatggataaaagcaatgccatgcttcagggaatccgccggcgtttgaaacgcaacgcgcttgccgtccaacaggatctggccctgatccgcatgatggacgccgccgagaatattcatcagggtagattttccggcgccgttttcaccgagcagcgcgcagatctcgccgccgtttaaggtaaacgaaacgtcccgcagaacatcgtttgcaccgaaggatttgtagattcccttcatttcaagtgtcatacatacactttcctttctgtatggcgtacaaataggagatctgccgcccatagaagacggctatccccttttaacaaaaaaggctgctgcttgcgcaacagcccctttgcagaacttttgaattagtaaacggtgttctccgggtcgaggtactcgtcaacgttgtctctgtcaacaactgtcgtcgagataatcttgaccggctctacgtccttgcctgcgagaacgtcaagtgccatatcaacagcgtccttgaccatcagcgggctgtaaagagaagactcaatccaaatgttctcgttttccttcatcatgttgaagtactcctggcagccgccgccaccggtgatgaccttaatgtcgtcacggtttgcttcggaaatagcctgcagaacaccgatagaagtctcgtcgtccatggagtaaacagcgtcgatgtgatcgttgctggtgaggatgtcggcgaagtcagcctgaccggcttcacgggtgaactgcgtagcatattcaacaatctccatatccggagcaatttccttcatggtgtcgaggaagcccttcttgcggagctctgcaacggaaccggaggtcggaacgtcgagaacgacgactttgccggtggtgccgattttatcgacaatgtacttagcgccttcaacgcccatggattcgttatcgccggatacacggtaaacgccgtctgctgcgatctcgatatcgaagtttacaacaacgatgccctcatcgattgcttcctgaatcggcacttccatgccttcccactgcgggaaagcaacgatagcttctgcgccccaggacttgaggtcgtcgatctgagaagtcatttcctcagcgttgttgctggtgtagagcttgtagtcgacggtgtcgctcagctctttgcagcgctgctcagcgtaatatgcaacgcctgcgacccaaccgtgggtaacagccggtgcaaggatgccgatcttggtcttttccgtggaagtgctttcctcggaagacgcggaagactcggattctgcagaggattcagagctgacagcactggattcctcagaggcagagcttgtggaagaggttccgttgcctgcgcatgctgcgaaggtgacgcagagaagcgcgagcgccagaacaatgctcaatacctttttcatgtgtgtttcctcctgtatctgcgatctgccgcagatgatctgaaatattttgagacgttgtgaataaactgtaaacgcctcatatactgggtattttactctttgttgtatactttgtcaatgatatttcatgaaaattttacgtttttgagcggttttctttacaagcggcattctccctgccctatccacttgattttctgctttgcagtgtgataaaatatttgggaatatggggtaggtttgcgctttgcagctttttaatgcctcgctctactcatcgttcggggaaccccctaattgggtttcccgaacaaaacagtccaccgaactgttttgcttcccttcctaatttttggataggcaaaaagatttcgtcgtctgcggacgacgatttagggcgctgccctaaaaaaccgcaaccgaacgcgtgcgttcggtttaagcttcttgaaaaagcttgcgcaaaactttgtgcgttcgctttactttagcttagatagcttcaatattaaataattgaaagtgtgtttttatggcaaatatcattcccatcacgtccttttccgcaccggagctggacgtttttgcgcggcttacggaaaaccagcttgtcaaccgcgccgaccccgcaaacgcaatgttcatcgcggaaagcccgctcgttatcggccgcgccttagacggcggctgcgtgccgctctcttttttaatggaaacgaagcatgtggagggcaaggctgcggaaattctatctcgctgccccgaagacattgccgtttacacggcggaactggacgttttaacacaactgacgggctttaagctaacccgcggcatgctctgtgcgatgcgccgcccggctttgaaaagtgttgcggagatttgcacaaatgcgcgccgtattgccgtactcgaaaatgtgatgaatcccacaaacatcggcgcaatcttccgcagtgcggcggcgctcggcatggatgcggttttgctgaccgccgccggcagcgacccgctgtatcgccgcgcgagccgcgtgagcatgggcacggtatttcaggtgccgtggacatatctgcccgaagacgtttcgtggcaggatacactgcacggtctcggctttaagacggccgccatggcgctgcgcgacgacacgcttcccctctctgacccgcgtttggagaaagagccgaagctcgccgttgtgcttggcaccgaaggtgacggccttgcaaacacgacgatcgagcattgcgactacacagtgaagattcccatgtcgcacggtgtggactcgctgaacgttgccgccgcaagcgccgtggcgttttatcaactcggcacactgcacaacaaagcatgagaaaaggacgctgcccaccggggcaacgtccttcgtttttaccacttttcaaaatgcacgcggttttcttcgtagcggctttcacgcggttctttattctctttcgcgggatagccgagtgcaagagcggaatgcggcacgatagtctccggcaggttaaacagtgcggcttgcttttcaacacggtccatctgcggccatgtgccgagccacacagagccgaggccgagtgcatcggcgcaaagcgtcatattctgcacggcaatggcgccgtcgatgatccaatagtccttcgcgggtgggaatgcacgctcgagatcgccgcagatcagaatggcggccgcagcctttttcagcggctgtgccggtctaccgttcgcctctgccatttcaagcagcttttcgcggtcggtgacgacgatgaacgaccaatcgcgcgcattcacgcagcaagggccactcatgccggcctctaaaatccggtgcagcttctcttcttcaatgggctgtgcggtgaaatcccgcacgcttctgcgattaaaaaggttttgcaaagcatccatacgggcacgctcctttatgtttttcgaagtcgttttgattttaccgttattctaccacgcaagaagaaaagttgcaagtgaaacttttctgagattctaaaagcaccgaagcaacgttatattggagtttcactgttttattttggatttatcgcaacgcgctgcggtattcagcgggcgtcatgtgctttacttttttgaacgccgccgcaaacttactggcgctgtcgtatccgacctgtgcggcaatctcggcaatgttccggcgtttttcacgcaacaaaatttccgccgcgtaattcatgcgataatcggtgagccacgcgccgatggatgtgccgtacgctgccttaaagcaggtcttcatcggtgtcagcgcaaaatcgaatcgtgcagaaagctcttcctgcgtgaagttttcggagatatgctcggcgagaaaatcgcgcacggccttggttttttcaagctgcgtcttataaaagtacggatgcgccgcgttttccttcggcggcgtcatgctgtcgagcgcgagcagcagctccagtattttgatctgaaaataggaaatacgtgctttttccggcacgcggtacatttcctcaaaaatgcgtgcgacctgctccgtgcacgcaataaccttaggcgttccgttcagcgcaaagcggcgcagaatcgccgccggggtaacggaaaagcccgccatgacgttcggcagggaacgcgaggcctgctccgggtcgagcgtgaccacgagtccatggtaatggctggaaggcaagtcgagcttctgcgagcatgacgcgccgttttcaagcttcatctcaccggcgctcacatagaaaaaagcgccttctcccaacgcgtaggccatgcgcccttcgcggcagtgctcgatcgtgagccgcatacggtcgtcggtctttccgcatacgcagtgcgtcatatgcagatctcgaaaccgaagctccacacccggaaaaatggtatagcatgtcacagtgccctcgcccgtctcgttgcgcagctgccacacggcacagccgtcactttccgcaagcagcatcgtgttttgctcttcttgttgtatcgcgtcacgcatgatacgcgccccctaacattatgttctgactgcgggaaaagagaccgttgcccgcgtgcggcattgtattaaaagttagcaacttctaactcgaattcaaaaataaaagtgaaattttcgctctatttggtcttttcgccctatttccttgttagtgatcttttatgtatcgccaaaacagaatttctcggttcacggttgacttctgctttaatttcgtgtatgctatattcgaaagttagttaacactaacttattcgatttcactgtatacggaggatacatatggaaacattttacggcatattgattccgtttcttggcacctcgctcggcgcagcgtgcgtgttcttcatgaaaaaatcgctcagcgatcgcgtacagcgcagcctgaccggctttgcggcaggtgtgatggtggcggcttcggtatggagcttattgatccccgccatagagcaatccgcagcgctcggcaagctctcgtttctgccggcagcgatcggattttggacaggcgttttgtttctgcttttgcttgaccacaccatcccccacctgcaccgcagcagcgaacaggcggaaggcccgaaaagccgactgcaccgcaccacaatgatgatgcttgccgtcacgctgcacaatattccggagggtatggccgtaggcgtggtgtacgccgggtacctttccggcagcgcacagatcaccgccgcaggcgcacttgcactttcgctcggcattgccattcaaaattttcccgaaggcgccatcatctccatgccgttgcacgctgaaggcatgaaaaagtcgcgtgcgtttttggacggcgtgctttccggcgcggtggaacccatcggtgccgtgctgaccgttttggccgcccagctcattgtgccggcgctgccgtaccttttgagcttcgccgccggagcaatgctgtacgtcgtcgtagaggagcttatccccgaaatgtcacagggcacgcactccaacatcggcacggtgttttttgccgtgggctttaccgccatgatgatcttagacgttgcgcttgggtgaacggtgtgaatgccattttaaatgctttgctcttttcagccttaacggctccgtttcatcgcgcaaaaagttagtttgttctaacccgcaaatctattataacgcgccattcaaaaaaaatcaagggcataccgcaaaagcatttcatctttaatgcggtatgccctgttttgatctcctcgattttttcaaaaattcctcatatagcaaaaagtcctgactttccgaagaaaatcaggactttggtggagacggacgggatcgaaccgttgacctcttgaatgccattcaagcgctctcccggttagtgcggttacataccccctaaaccgggtcaaaagagcgcttcaatacgcgggcttctccaccataagaaagcttggctttaagcacatatatattctttgacttcgcgtgcgatttgctcccaaatatcatcaggtaattctttgaaattataatatttcccagcatacatagattgatagtcatagttttcgggtagtacgctcccgctcgttgttctcttgtcatcccatgcaacagcgtatgagtgaaactcgtgaatcaaggacaaaagagcatcaatatctttaattctccaacccatgacatagtcttttgttgcacgctttgcggcctcgatgtctgtaaactgaaaacacccttgcacatcacaagtccccggaattctctgtttgattgcattaagcgctatgtcagaatacttctggcacagctcataaaactgtgtgctttcaaggttttcaacgcctggccatagcaggtcaatctgttcctttttattttgtaatccaagataaaaataatccttggagtcgttaattacgctcatagatacacctcccatttaattttgcgctattattatatcatacgctattgcaaaaagcgacagaaaattacgttttgagaattgcactgtccgaggagactgtgggggcgttttccaatatcccaaacagaaaggaggtttcccactgctggccagtctgctgactggtcttttttatgccatgtcgaagaaagttaattgtggcaggcgatatagagaacatcaaccccaagatcaaggagccaaagcggcttgagacaaaatgtcccaaaggattatttgttaaccgatatgtaagatacaaagggggttaccttggtagtatatctttatgcgctaaaacaaattcccgccttatcgcttccagcattttgggagaaggataaattgttttgtccggaaaatccattgttgcatactctttggcgtagtattttggcattcgattataccagtccaacataaggtggagtttttgcttctgttcttctgtttctggagtggcggcattcataatgtgcattacatttctattaatgacttgcaaaagtgctattccatgtttcttggcgtattcatacgctccactttgaaagccacaggtggagatcataattcctttatgtgcaccaaggctttttactttatcggctaacacagcaactttctcacgagaaacgggagaagagtatctcttgcactctgctatgactttgaactcaacgcccatggcaataaaccttgcatagacatctatttggtatgtaccatcatcagcaggaatagatacattatgctggatcgagaagtctgataaatgctcagcttctgcatagcccttcaatatttccaagcaaagttcttcaaattccgttggggatatactcgcaacgaattctcgataaggattgattgcccccattattactcctccatggatgctcttttatctttttctctatcaaaatttactgcaaggcaaaggtatattatcaactcccttgccaactttaagagacggaatgtattattttcaattttttcctcggtagtatattttgtaaaagatgtattatgcgattgcgttccagtgcgtagacaattatgctctatgtcgtttctcatctggaagattcgttctgcgtgaggggtagtaacattaatttcttttctttcgtagaaatctttttggagccaatacatagctttaaccagagggttatccgaatgagtattcatgataggcttgggaattgtgaaatacacttgtccatttccatcaatcagttgttctttccatatatttttgaaacttacttttgtatctgtaagccccacttcaaaatactggttgatgaaaaatccaatcctatcaaatagagagtatgctgccttaaaggcagttcgtaacatactttctcttaaagaatgatctgaagaatcccccgtatcaactaaatccaattcccgatccgaataatgctcgtttgcttcttccgttgatgtcttataccataagagtctggcccaattatattcttgcttgatttggttaaacaggccaatgaattctttttctctgtcactatatggcgcttcaaagggaagattgatgctatcaactgcaaagcagtgatcagataatatttccaaacacgggtctaagaaaagtcggaataaaagcaaatagtttcgataatcggcttcatcttggttgtctacttcaaatagtggaagttctagtggtttgttcaaatagttctcaacatatgcagaatcgaacaaagaaatattggatttcaaaccttccaaataatcttgatcttctaggtttatcttgcaacgttctgtttgcttataatagtaatagcaggcatgatgatagtagctctgctcataacgtttgatttgcaacggtgcacacctaaacagcaaaaacgatagattgagacttgccatcgcaaaatcattgctaatcagcaaagcgtcttgaaaacagtctattgccacaatatggcgacctaatgctcgataagcgtttccgagatttgtgtatgaccgcatggcaatatactgagctacttttacttcagcactgtcgctgtctgcatcataataattggtttcatacatatctaaggcgcagcgcaaatggtataattctttttcaaggtaacgctcgctatatactccttcaatcatgcggagatcgtgatatgcattcgcaatgtcataatgaatctgcattttggtcgatatattatgctcgccagacagcaaggcttccgctaacttgatagtgggcggaatttccttagcattcttgtcgaggtataaattgtcaaaggccatagacaagtctctaacggatttatctatgacagtagaaaaattgttctcaaattcagctattttctctttgtagtttggcataccaacagtcctctatttcttccgaaaactaatcatagaacacattaattatagcatcaaattctagtattttctacaataataataccgttcaataggacaacgggcggtaatgtacacctttctgaaaggaggtttcccgttgctggccagtctgcggactggcttttttcatgccacgaaaaggaggtttgcaaatggcagatgataagaaaaacattcccgaggcagcccagcccgccgagactcccgctcccacggtagaaaatgtagccgtgccggagcagcccgctcccgagcctgtgctgaccgacgcagaggcggtcatgctggagcacgaggggcacgcggcgctctttgaaatgggcgatgccatgcccgatcccgccgacgctgttacccacgccgaggtggaggagcctgccgcgcccgaagtccccaaggctgaaaaggaacaggagcagccgcccactcccggcaaggacgatcccgccccggcacattccggcaaggtggtggattttgtcgctgcccgtgacgaggctgccaaggaggagaaaaaggcggtcaagcagaagccgcccacggaaaaggacaaggccgccaagcccggcagaggtcgcccgtccaaggatggcaaggccgctcccgataagaccaagccgtccaaacctcgggacaaaaagtcccaaagcaagcccatcccggagaagcctgccgtggataagggcggcgctcccgctggggcggaggccacgccggagccgtctgcgccccgtgacgcaacccgcgccgaaaaagaggagatcgtctatctcaacctgtctgacctgcacccgttcaaagatcatccctttggtgtccgggacgatgcggagatgcagggacttgtggagtcggttaaggcggcaggcgtcaatcagcctgcgctggtgcgtccccgtgaggatggcggctatgaaatcatcgcaggccaccgccgccagcgggcaagcgaactcgccggatttgcgaatatgccgtgtatcgtccgcaacatgacggacgatgaagccatcctcgccatgacggatgacaacctccgccaccgtgagcgcattttgcccacagaaaaggcacagtcgctcaaaatgcaggtggaggccatcaagcaccaaggctcccgccccggtgaggaggacaaggacgccggaaaacgctctacgcaggtcgtgggagatcgcaacggcatgaactacaagcaggtgcagcggtatatccgcctgaccgagcttgtgccggatttgcagaaaatggtggacgagaaaaagctggcgttcaccccagcggtggagatatcattcatccgtcccaaaaatcagagatatatcgccgtgtccatcgaggggcagcagtcctcgccctcgctgtcgcaggcacagaaaatgcgggagctggacaaggacggcaaactcaacggcgatgtgatcgacgggattctgtcgcaggagaaaaaggaggtagacaaggtgatcatcaatagtgcggaactggaaaagtatttcggcaaggacaagtccccgagggaaatgaaggacaaaatcatttctctgctggatgactggaaggccaagcagccgcccgagctgggtaagcccgaaaagaaaacagatcttgaaaagtgaccttgggactttttgtcccgaggtctttcgtttatgaattggaggtttttacaatgaaacgacccctcgcatatatcaccgctgcatggtgcggcagcgaccacgaaaacgcaaagctggcggcgcagtattgccgcgctgtctatgaggcgggcttttcgcctatttttccgacgctctatcagccgcttttcctcaatgacgccgttcccgaggagcataagagcggcatcgacatggggcgcgacctgctccgccgttctcatgtgctggtggtgtgcggtcataccgtcaccgaggccatgaaaaatgacatcgccgttgcccagcggctcgggatcaccgccaccacccttgagggcatattgaccgtcaagggacagggacgcagataagatgacggcgctccggctggggagcctgtttgacgggatcggcgtattcccgctggcggcggtgcgctgcggcattgagctggtatgggcaagcgagattgaaaaagcccctatctccatcacgaaacgccactttcccgatatggcgcatttgggggatgtgacgaagctggacgggcgggatctcccgcccgtccatatcatcacctttggctcaccatgtcaaaatctttcgcagatcggcaaccgcaaggggcttgcgggagaaaagtccagcctgttctttcaagccatccgcattatccgtgaaatgagggaggcgacaaatggtctatttccagcaatcgctgtttgggaaaacgtcatgggagcgttttcatcaaatgaccggatggattttagagccgtcctatccgctttcacagacaccgatgtttcaatgcctgcttctggaagatgggcaggagccggaatggtgcgagggcgaacgcctgacctctgctggcggctcatggacgcccagcattgggcaagcccccggctggcacgacggcagcgcatctttcttgtggcagactttggaggacggcgttcccacgaaatactttttaagccccgcacaatgcagtcacttcctgcacttggcggagatcgcgggctgcccgccgcctgcggagatcgaggctcttttattgaagcagggcggcgtgtaccaattacccgaccctttcaatgcttccgtatgcgggcgtccgccaaggaacggacggaaacagcgttccgaaacagcttcggactgccaactgacccttttcccactctgttagcgggcggcatttcgccctttgccttttggtatgaggatgatcccgccgggggctgcgtccgctttcccacggaaacggaatgtgagcggctgatggggctgccggagggctggacaaggtacggtgcggacgacgagaaaatcctatcctcccaccgctaccgggcgttgggaaacgccatcgcgctgccctgcgccgagtacatcatggcagggattgcggaggcgctgacaaaaggaggtgcaaatgacggtatttgaagcctacatcaccaacctcggcaaatacgccgaggggcagcttgtgggggaaacgctgaaatttccggccaccacagaggaggtgcaatcgctcttaaagaacatcggcgtggacggtgtgcggtatgaggagtttttcatcaccgcctttgacggcgatgtgatgggcttatacgactatctcaccgagtatgaaaacttggacgagctgaaccatctggcgcacctcatttccgagctggacagcgacgagatcgaaacgctggaggccgtactcaacaagggcgaccatacttccagcgtggcggacatcatcaacctcgttcacaatctggactgctacgatctgcaccccggcgtgaccgacgatgaaacgctggggcgcatctatgtggaggacatggagctgttggatgtgccggataatgtgctgccctacttcgattttgaagcctatgggcgggatatgcggatcaatgaaggcggccacttcgcccccacgggctatctgacccgcagcggcgatttcaaggaggtgtaccacggcatcgaggacattcccgccgaacaccgcatttttacgtaccccaagttgaatatccgggagcagatggcggcctacaaggaggtcatagaccgttcctctttggagggcgaacgcctgcacccgagaaaggagcatgatgaacgctgaccttgggacaacttgtcccaaggtcataattctatcagagaggaggcgatgacggctggtagatgaggatatttcccggcgcacgattgccatatcggtgaaggcgtcgaagctgaccgctcgggggcttgcctatgttgtccgggcggtggggcgcaagatcgccaaggcgcaccgggcaaagcagacacctcacggcaagcagaccgtaaaaaagctcatggcgcacggcacatccaccagcagccttgaactgtccggggacacaaagctctttgaccgggtagcccggaaatggaatgtggactatgccttttatcagaccgaaccggggaaatacctgctgttcttcaagtccgggcaggcggacgctatgaccgcctgcttttcggaatattcccgcaaggtgctggataaggccaagtcccgccagcccacgatccccgaacagatgaagcaggcggaacagcagcttgccaaggaaaagccgcccaaggagcatatcaaggaggtgtcgcatgacagataagctccgtaaatatgtgctgccaaacattccctatgtgttcatcggctgggcgttcctcaagctggggacggcctaccgtctggcggcgggcggcgattttgcccataagtttatcggtttgggacagaccgtcggcgcggcctttgccgatttcgcccccggccttgccctctttgactggctggtgggtattgtgggcgcggtggcgttccgcctgctgatttacttcaaaagcaagaacgccaagaaataccgccgggatgcggagtacggcagcgcccgctggggcaacgaaaaggacatcaagccctttgtcgatcctaaatttgaaaacaatatgctgctgaccgccacggaacggctcaccatgaacacccgtccgaaaaatcccgctaacgcccgcaacctcaatttctgcgggatcggctcgtccggctccggcaagacccgcttttggctcacgccgcaactcctgcaagcacattcttcctatgtggtggtagaccccaagggcggtgtgctggggcaggtcggctcatttttgcaaaaacggggttataaaatcaaggtgttcaacagcattgatttttcaaaatccatgcactataacccgctggcgtatatcaagaccgaggccgacattctaaagtttgtcaacgccctcatttccaacaccaagggcgacggcaaggagggcgatccgttctggacgaaagcggaaacgcttttgtactgcgccctgctgggctacatcatttttgagggagccgaggaggatcgcaacatgaatacgctggtggacatgatctccggcatggaggtaaaggaggatgacgaggattttctcaacgccgtggactatatgttcaaggggctggaacagcgcaagccgaattgctttgcagtgaagcagtataaaaaatacaagctaagcagcggcaagacggccaaaagtattttgatctcttgcggcgcgcggcttgctccctttgatattccccagctccgggagatcatgtcctatgacgaactggagcttgaccgcatgggagatcgacgcacagctacttttttctgtatcagcgataccgacagtacctacaatttccttgtggcgctggccttttcgcagatgttcaatctcctgtgcgaacgggcggacaatgttcacggcgggcggctgccctatcatgtgagggtgctgtgggacgaggcggccaacaccggacaggtgccgactttggaaaagctggtggcggtcatccgctcacgggagatcagcctgtgcctgctgtatcagcagcttgctcaatgcaaggccatttacgataagaacactgaaaccatccttggcaacatggacagcgtgctgttcctcggtggccgtgaggccagcaccatcaaggaaatttccgagaactggctgggcaaggccaccatctccatgcagaccgaggggcgctcacggggccagtctgaaagttacagtcagaacacccaacggctggggcgggagctgatgaccccaagtgaactcgccaccatgcccggagatcggtgcattttgcagctccgggggctgccgccgttctattccaaaaagtatgatttgaaacagcaccccaattatcgctttacggcggaggccgataaacagaaaaacgcttttgaccttgacaggctcattaaccgccgcaggcggcccggtctgaacgaggcgtgtacgatgtatgaggtgactgtgccggacgatgcactcacagaagaggacgaggacatcctcaactatgatgacatcgacgacccggacgcttttgtatagagctttgggacatttcgtcccaaagaagaactcacactctgccttacgacgaaagtgtgagttagaagaattattctgatttgctgtctgtgttatcggcactcacttggcggactgtaaccaactgttgcaacttctccccaactccgtgcaattctctggtctgggctttcatttctttcaaaaaatcatcaaaatcgcagtccacggaaaagaatgttgcataggagtcaaaatcaatgttaaacgcttctttgtatgtacgctcaccatcttggtagaccacttgccccgaaagaggatatttgtctgtgttttcacggaatttgtttgagccgaagtagagatcataatgttgcccaattccaataatacattctttgccgtttgctcgctttaacatttcgctaaatgaaggctctttgaggctgtctaaaaaagtttggtcaagttgtatgcgtacatgatttgcaagacgttttccatgatttgaaaaacgcagcccgtaaaacacttttcgctcataaataagctcaacggttatatatggacgattatcttcttcatattgacggcgcatctcagcagcttgatctcttgaagccttggttgccccatagttatagtagcaaataagaattgtagctaaaacatagattgcggttaacacaaccattgcccaatcagtcatttattttcacctcactaattgtttttatctacattataccgcaattcaaattgccaagcaatgagaaaggagccctttttatgttaccaagagcccctcccgcaaaaaagaaaccttgtataaaaaccagttagtaggctgccgcccgcaagggcggcttttttcatggccggggctttgtccccggagaataggaggctatatgcagtttttcgcttctgccatcaccactttgcagacccttgtgattgccctcggcgctggccttggcgtgtggggcgtggtcaatctgctggagggctatggctcggacaaccccggcgctaatgctcatgtacggtagagaagcacaagacatggatagccagccctgccactattccgaagtcaggggaacgcaatagaaaaattcatagctgtatgctatacttaattagcatttgaacatatcaagctgacacagcaatctctttgcttgccgttaatgtgcgtctaccaacagtccgcagaaagcaagagtagcgtaaaggtataaaaatttcaaacttctttgtaacgaaattccgatttctccgtctaacctatgaagctgaaggaggtgatgacaagtatggactatgaaaagctctataaagcctactatttacaggtatactcgtatactatttctcttgccaaaaatcgtgagatagcagaggaaatcacgcagaacacattctataaggctgtttctacaacatcacaattcaaaggtaagtcagatgaattgacatggctctgctccatagcaaaaaatctttaccatgatgaaatgcgaagccgtcagcgagtagctgatgtgagtgaaatcaatgacttgccatcaaatgaaaatgttgagaactcagttgcagattctgacatggcgttccgcatacacctcgttcttcaccgtttggaagaaccatacaaagaagtctttcagcttcgcgtattcggggaactatctttttcacaaatcgctgcaatttttggaaaaacagaatcatgggcgagagttacttatcatcgtgcaaagctaaaaattcaagaaaggatggatgaaaagcatgagtaaacaatgcgatattgttcgagatattcttccgctgtatgttgacggtgcttgcagcgaagcaagcgcagagatggtaaaagagcatttgaacgcctgtgctgattgtaacgcaatttatcagaaattgctttctcacacgagcgaagatgttcttcacgaagaaagcgaaagcgttattatgcgccatgaggcaaaagaaaagcagaggggcaggaaaaagataacgattgctgttctcgtttccatcgctctttgtaccattgcaatttttacagctctctttctgttacctataaacattgcttatgagcctgtcaaaatcgacttcccatttgaggttgaagatgtcgaaagcgttgaaatgtaccactatgacggagtgcctgcatcagcagaaaagaaagtagttgttgctgaaaatgatataaagaccctgtatgataagttcaaggacttatccttaaaagacaaaacaactgaggaaactgccggagcagatgtgaccagctttagatttaacctctcagatggaacaagctacgatttgatttacgcctgctatggagttaaaaacggcgaattgaagtcagaagcaggcggttttaagtatttcacaagtgcggatattggctcttattggaacaatttgaatacggaccttgaagcaattcctatcaatgagagtgaattgccgtgagcagatagcaaacccagccgagcctgtcaacggtcaagatgaacggcgcaaatgcgccgccgttgacagccccgcccgtctttgctgttcggtaatcaagagggcgacagcacaagatgctgccgccctctgccattattcagaaagggggattttccatgaccgaacacgaaaagtatcaagaacatatccggcatacacacgatgccttttgcaagactgttattcgccacgctgccatagacgcagcccggagcatacggagccgccgcaagcgggaaatctcgcttgaatatctgatagaagaaaaacactatccattcagtaccacagataaatactttgcggagcaatccggcatgaccagctatccgcttttcgtctgtggtcagatggtgcttttggaaagtccagagcttgccgcagccctgtccgcactatcacagatggaacaggaaatcattttcttgtactacttccaacgattgacgcatagggagattggacggagatatggacgggctggcaacacaaccgggcggcgtattcagatgattttacggcggctacgggcagagttggagggcttgtcctatgaaccagctacttccctatgaaacaatcgttaaggcaagcgagggcgacccggaagctgttgccgccgtcctatcccattatgccggatatatccgctcttgtgcgaaaatggacggacagatcaacacagatatgcaggaacatatcgtcgggcggctgatagaaagcctgttgaagttccgctttgaccgctaagcagaaaagttgtataattagagcctgacaaattaaactttaatgggggtggagcaaatggaacagattatcaattatagagacatacccacagataaaaggcttgacatattaaatgctcttgagcgaataggtttttttcctgcatacggcggtgtgaaaaccatgcaacaaattatggaaaagtcagttccgggttcaggtccacaattctatttcgttttccgtgaaaatgagttgatagggtacaattttctcattggtgacactaagaaatataaagcgttcccatggcttgctattagcaatatggatgagcagaagttggctgtttgcgaagaactgatgaaaatacaaattgctttttttgaagaactcggaatgcaaaagatagcagatcattgcgttaggattatggaagattacagaaaagggattggaaagcgaaaagaaagcgattgcagataaattccatttgaaaaacggctgacaatttaataccgccgcccatcacagcggcatataagcagtaaatcttgaaaaaggtttgctgctttttttgcgcctattttcaaaaatctttggcaaaccacaccgccggattgttgtagggagcaggacggggaaatcaaaaaaatttccgctgcatttgccaaaacgcacctttttcaccgttgtagtggtgaacagcgggcagaacacgccgccgcaatcgctatattggtggagcaagccagtatatccgcaaaccagagccgccgaggaaagcggcagttttttagagcaagattctaccacggtgccaaaatccgcatatctgcggttttgcccctttggtaaatcttgttggggagtgccttccccaaaccctgctcatgcgccctgtcgggcgagaaaggaggtcaacgcttgaagaaaaaatacaacacgccccaccgctgccatgtggtcaaaacccgcatgaccgaggaagaatacgccgactttaccgagcggctgaaacactatgacatgagccaagccgaatttatccggcaagccatcacacgggcgactattcgccccatcgttaccgtttccccggtcaacgatgaactgctgtccgccgttggcaggctgaccgccgaatacggaaaaatcggcggcaacctcaatcagatcgcccgcgtcctcaatgagtacggcacaccatacaacgccctgtccgttgaagtccgcgccgccatttctgaccttgccgccttgaagtttgaagtcttgcgaaaggtaggtgacgctgttggcaacattcaaacatatcagctctaaaaatgcggattatggcgcaaccgagcagtacctcacctttgaacatgatgagtttaccatgaagcccacccttgatgaaagcgggcggctcatgctccgggaggactaccgaatagcaacgctgaactgcggcggcgaggattttgctgttgcctgtatgcgatccaatctccgttatgggaaaaaccaaaaacgagaagatgtgaaaagccaccactacattatcagctttgacccacgggacgcagtagacaacggcttgaccgtagaccgggcgcaggcgttgggcgaggaattttgccggaaacagtttcccggacaccaagccattgtctgcacccacccggacggacataaccacagcggaaatatccatgtgcatatcgttatcaattctctgcggatagcggaagttccgttcctgccttacatggacagaccggcggacacccgcgccgggtgcaagcaccgctgcacagacgcggcgatggaatacttcaaagccgaagtcatggagctgtgccaccgggaaaatctctatcaaatcgaccttttgcatggcagcaagaaccgcattaccgagcgcgagtattgggcgcagcggaaaggacaggcaaagctggacaaggaagctgccgccttaccagccgaggagcagccagccaagcccacgaagtttgaaacagacaaggaaaaattgcggcagaccatacgcgccgcgctgtcctctgccgccagctatgacgagttctccgccgttcttttgcagcagggcgtgaccgtcaaggagagccgggggcggctatcctatctcacgccggacaggacaaagcccattaccgcccgcaagctgggcgacgattttgaccgcaccgccgttcttgcccttttggaacagaatgcccacagaaccgccgagcagaccgcagccatacccgaatatccccgcagcataaaggagcgtttgcagggtaaaaaagctgtccaaaccgccccggaaaaggacggtattcagcgtatggttgaccgggcggcaaaacgagcggagggaaaaggcgtgggatatgaccgctgggcggcagtccacaatctgaaacaaatggcggctaccgttgccgcctacgggcagtacggctattcgccggaggaactggacgcagcccttgtatctgccaatgcggatttacaggacagcaccgccaagctgaaagccctggacgctgctatccgggagaaaaaagagcttcagacacaggtgattgcctatgccaagaccaagcctgcccgtgatggtctgaaagcacagaaaacggagaaagcccgcagcacctatcgggaacggtacgaaagcgattttatcatagcggacgcagccgcccgttatttccgggcgcatggcgtttccaagctgccaagtcataaggcgctgcaagcggaaatcgagcagcttaccgccgaaaagaacgcccactacaacgaataccgggagaaaaaagcccgcgtcaaggagctgcataccgtgaaaagcaatctttcccaaatcctgcaaggcgagaaagacagagagaaaacacacgaacaggagcgttaaaaaccgccccaaacgataccaaaacggggatatgccctgcaccctatccgcaatactacccacctttgaaacggggcatacagcgcaggaaatccccgaaaatgataccgagaaacaacatttttaccgacctatccgcttataccagcggaagcggcagaaaggagcgagaaatgccgcgcatgagcaaaaagcggcggttggaatggagctttttcctcaaccaccgaaaccgtattacttacaatgacctttgccggggctgcacacacggctgcaagcagagcttccgggcgattatcgtcctctgcccccggtatttctctaagagatggaaacacagggaggacaccgccaatggcagataaccgcaaatattactacctcaaactgaaagaaaacttcttcgacagcgattccattgtgctgttagaggacatgaaagacgggattttgtattccaatatcctcttgaagctgtacttaaaatcgctgaaaaatggcggcagattacagcttgacgagcatatcccctataccgcccagatgatagccacgctgacccgtcaccaaatcgggacggtggaacgggcgttagccatcttccagcagttagggcttgtggagcagcttgactgcgggctgctttatatgaccgacattgagctgatgatcggtcaatcctctaccgaagcggaacggaaacgcgccgcaaggcttgaaaacaaggcgcttttgccgccgcggacaaatggcggacatttgtccgacattcgtccaccagagatagagataaagaaagagatagatatagagttagaaaaagagggagagttaaagggacaagcccccgcccgccgctatggcagatacaacaatgtttttctttccgatacggaactggacgagctgaaagcggaactgcccgacaaatgggagtattatattgaccgcttatctactcatatagcgtccaaaggaacgaaataccgtagccatgcagccacgatatacaagtgggcgcaggaggacgaagccaagaaaccgccgaaaaaaggcatacccgattacacctttaaggagggcgagagtttatgactgaactttttaccgataccgttttgaatatgatgactactaccgcagagccggaggactacacaggcgaggacgggctgctttactgcggcaagtgccgcaccccgaaagaagcctacttcccggaaaagcaagccgccccgtttgggcgtgaccgccacccggcagaatgtgactgccagaaagccaagcgtttggagcgtgaaaccgccgaacagcgcagaaagcaccttgataccgtggaggacttgaaacgccagggatttaccaatcccaccatgcaggaatggactttcgccaatgacaacgggaaatgcccgcaaatggagattgcacacttctatgtggagcattgggaaatcatgcgcgaggaaaatatcggctatctgctatggggcaaggtcggcacaggaaaaagctattttgccgggtgtatcgctaatgccctcatggagcaggaagtcgctgtccgcatgacgaatttttctgcgattttgaatgacctgaccgccagctttggggggcgcaacgagtatatcgagcgtctttgccgatttcctctgcttatcattgatgattttggaatggagcgcggcacagagtacggtttagaacaggtctacaatgtgattgacagccgctaccgcagccgcaagcccctaatcgtcaccaccaatctgacattggacagcctgcaaaatccgctggacaccgcccatgcccggatttatgaccgccttttggaaatgtgcgcccctatcctctttacgggtgagaactttcgccgggaaacggcgcaagccaagctgaacaggctgaaaaagctaatgggggccccacaaagccgtaaggctttgcggggagaggaggagcaaggaaatgagcgtagttttccgctccagcgggaaacggagccgaatggactttgcgacgacgagatgaaatgaaaggagttgcctatggcagagaacaagcagaacaccaccccggaacgccgcccggactgcgtgacagagatccgcatgggcaacaccgtccttgtcgtttccggctttttcaagaaagataccaccgacaccgcagccgataagatgatgaaagtgctggaggcggaagccgccgcaggacacaaagcccagctttcgccttaacgctacaagccgcacagaaaaatcgtcattttaccgggcggtaaagaagcagaagccgctatacagacagccgccccatgtggtataatcgaaatacggaatagtggggctggctgtcggaaacggaggattttatgttaagacagaccacccagaaaatcactgccctttatccaagactatcccatgaggacgagctgcaaggcgagagcaattccatttccaaccagaagcgtattcttgaaacctatgcaaagcagaacggcttttccaatctgcgctggtacacggacgacggttattctggtgcgaactttcaaagacccggtttccaagccatgcttgcggacattgaagccggaaaagtcgggacagttatcgtaaaggatatgtcgaggttagggcgaaactacctgcaagtgggaatgtatacggaaatgattttcccacagaaaggtgtccgcttcatcgctatcaatgacggagtggacagcgcacagggcgacaatgattttgccccgctgcggaatatctttaacgaatggctggtgagagatacgagcaagaaaatcaaagcagtaaaacgctcaaaaggcatgagtggcaagcccatcacaagcaagcctgtgtatggttacctcatggacgaggacgaaaatttcattattgacgaggaagctgcacccgtagtcaagcagatatacaacctctgccttgccgggaatggtccgaccaagatagcccgtatgctcacagagcagcagatccccacgccggggacgctggaataccgcaggacgggcagcacccgccgctaccaccccggctatgaatgcaagtgggcgaccaataccgttgtgcatatccttgaaaaccgggaatacacaggctgtctggtaaatttcaagacagaaaagccctcttacaaagtcaagcacagcgtagaaaatcccccggagaagcaagtgattttcgagaaccaccacgagcctatcatagacacccagacatgggaacgggtgcaggaacttcgcaagcagcgcaaacgccccaaccgctatgatgaagtgggcttgttctccggcatactgttctgtgcggactgcggcagtgtcatgtatcagcagcgataccagacggacaagcgcaagcaggactgttatatctgcggcaactacaagaaacgcacccatgactgtacggcgcactttatccgcaccgacctcttgaccgctggcgtactctccaatctgcggaaagtgaccagctatgcggcaaagcatgaagcccggtttatgaagctcttgattgagcagaacgaggacgggggcaagcgcaggaacgccgccaagaaaaaggaactggaagccgccgagaaacgcatagccgagttatccgctatcttcaagcgactgtatgaggacagcgtgaccgggcgcatatcagacgagcgtttcacggagctttcggcagactatgaagccgaacagcaggaattgaaagagcgtgttgccagaatacaggcggagctttctaaagcgcaggaagccaccgtaaacgcagaaaagtttatgaacattgtccgcaagcacatgaactttgaagaactgacccacaccctcttgcgtgagtttgtagagaaaatcgttgtgcatgagtgcagctatgacgagaacaagacccgtaggcaggacattgagatttattattcttttgttggcaaggtggacttgcccgaataaccgcccgacctgtccgacacaatgcgcaagtgccggataggaacggcaaaatttttacacttctactacttctttatcgaacatcagtaaagtctcagggcatgaagcagctcatggcgggcggcggcatcatcgtgctgggtacgaccctgatccctctgctgtccaccctgttttaagggcgtaaagcatgggatttctcaccgactggctgacagactggctaaaagagctgctgatcgagggtatcatgggcaacctcacggggctttttgatacggtcaattcccgtgtcggagagattgcggtgcaagtgggaaccaccccggcggcatggaacgccggggtattctccctgatccggcaactttctgaaacggtgatactgccgattgccggtctgatcctcacctttgttgctacctatgagctgatccaactcattatcgagaagaacaacctgcatgatctggactactggatcttcttcaagtggatattcaaaacggcctgcgccattttgattttgtccaacactttcaatatcgtcatggccgtgttcgatgtgtcccaaagcgttatcgcccgggcaaccgggatcgtgcaaggctcaacggacatttcggaggccatgcttgccgacttggaggccacgctggaagcgctggggcttggctctctgttggggctgtggctgcaatccctgctcattcatgtgaccatgtgggcgatcaatgttgttatcttcgtgattgtctatggccgcatgatcgaaatatacctgctgaccagcttagcccccatccccgttgctacgctctctaaccgggaactgggcaataccgggcagaactatttgaagtccctgtttgccgtgggatttcaagggctgctcattctcgtctgcgttgccatctatgcggtgctgatacagggtatcgccacaagcggcgaccccatcggcgcgatatggggctgcatgggctattccgtgctgctctgcttctgcctgttcaaaactggctccatcgcccgcagcgtgttcagcgcacattaaaggagggacagctgtaaaacttgctgttgaattttacagcagaatggggtatactgtgtttgaaaggagctgatagatatgccgaacattaaacccatttctgacctgcgaaattacagcgaggtactgcatgatgtggctgtgggcgctcctgtctttttaacgaaaaacgggcgcgggcggtacgccatcgtggatatgcaggactatgagagaacacaagcgaccatccgcctgatgaatgagcttgcaaaaggccgtcactctggcgaaacggaaggctggctgacaccggacgatatgagggcgcatttccgcgcaagagcgaatgaagaataaaatacattattcacccgagtcccgtcgtgatttggatgacatttgggattacatcgtatcggaacttcaaaatcgttctgctgcggagcgcgtgatcaatcgcattatagacgcggttgacccgttgaaaaatttcgcagaaatgggaaccccgttatcctctattgcagatataggaactgactatcgttttcttgtcagcggcaattatatggtgttttatcgtgtgcaaggcaacgatgtctacattgaccgtgttctgtatggccgcagcgattacatgagcgtcctgttcaaagacttgctgcgcgaagaaacaaccgaataaacatcatttttgctgaccctaacaaaatgatccgacaagaccgcttgctttcatgctggcggttttttcatgtccaaaggagcgtgacaatatcgaaaaatattccattatctacgctgacccgccgtggcgctactctgcaaagaaagtgcagggcgcggcagaaaatcactaccccaccatgagcattgaggaattgtgtgcgctgcctgtggccgagcttgcggccaaggacagcgcccttttcatgtgggcgacctttccccagctcccggaggctctgcggcttatccgtgcgtggggcttcacctataaatccgttgcgttcgtctggctcaaaaagaacaaaaaggcggatagctggttttatgggctgggcttctggacgagggcgaacgccgagatctgtctgctggcgaccaagggacacccgaagcggcaggccgccgacattcaccagtttatcatttcgcccatcgaagcccacagcaaaaagccggatgaaacccgtgataagatcgttgccctcatgggcgatttgccccgtgtggagctgttcgcacggcagacctctcccggctgggatgtgtggggcaacgaggtagagccgacgatcccggactttgggacaaattgtcccaaactggaggtgacagactgatgccctatgtgaatgtcccgaacgacctttccaagatcaagacaaaaatcgcgttcaacctcaccaagcggcagctcatttgttttggtatcggggcggcggtgggtattccgacctaccttttgacccggcaggccatcggcaacaccggggcactgttcgctatgctggcgatcatgctcccggcgttcctgctggcgatgtacgaaaaggacggactgccctttgaaaaggtgatccgcaacatcgtccgggtcaagtttacccgccccggcatccgcccgtaccgaacgaaaaatatctatgccccatttgcgcgaaaggagaagcctattgagcaaagcaaaaaagcagaaaaatgcaaataagcaccgggcgctgtccgcccagcagaccattccctatatcgccatgcacccagacgggatctgccagctccccggcgggctttacacaaagacgctggaatatgaggacatcaattatgccgtggcgtccacggaggatcagactgccattatcagcgggtggagcgcgtgcctgaattattttgacagctctctaccgttccagctttcctttgtcaaccgccgcagccgcaatgttagccgctacaaagtgaatatcccggcgcaggaggatgacttcaacagcatccggggcgaatatgtggaaatgctcaaaggccagatcgccaagagcaacaacggcattgagcggtacaaatacatcacctttggcctgcctgccgagggtgtagcggaggcgcgtccccggctggggcgcgtggaggcggatgtcatgggcaatctgaaacggctgggcgtccagtcccgcccgctggatggccgggatcggctggcggtgctgcatgggcagatgcaccccggcgggcgtgagccgttccgctttgcgtggaaagatattaccaagacaggcatggggacaaaggactacatcgccccggacagtttcgactttcggcagaaccggactttccgtgtcggccagatgtggggcgcggcgtcctatttgcagatcatggcgtcggagctttcggataagctgctggcggagattttggagctggacgccgagctgaccgtcaccatgcacattcagacggtagaccagctcaaggccattaagacgatcaagggaaaaatctccgacataggccgcatgaaagtggaggaacagaaaaaggctgtccgtgccgggtatgatatggagattttgccgcctgacctcattaccttttccaaggacgccgccgagctgctctccgacctgcaaagccgcaatgagcgaatgttcctgctgacctttactgtggtgaacctcgctcccacccggcagcggcttgaaaacgatgtgttcacggtgagcggcatcgcgcagaaatacaactgcgccctgcgccgtctggactggcagcaggagcaggggtttgtgtcctcgctggcgcttggctacaacggcattgagatccagcggggcatgactaccagctccacggccattttcattccctttatgacccgtgagcttcgcatggacggacaggcgctctactacggcatgaacgctctttccaataatgtcatcatggctgaccgcaaaaagctcaaatccgccaacggaatgtacctcggctctacgggcagcggcaagagctttgccgccaagcgggagctgatcaatgtgttcctcgccaccaatgaccgcatcatcgtggttgacccgatgggcgaatatgccccgctggtgcggcgcttgggcgggcaggtcattgagatcgccccggacagcccgcaccacatttcgcctatggacttgcaaatgaatatcaatgacgaggacagtccgctttccatgaaggcggattttctgctgtccctgtgtgagctgatcgtgggcggcaaggagggcttgcagcccatcgagaaaaccgtcattgaccgctgtgtgcggctggtgtaccgggagatggcgctgggactggaaccagcgaaaacgccgctgctgcaagatctgtatgaggagctgctgcgccagcccgagccggaggcgcggcgggtggcgacggcgttggagctttactgcacaggctctctcaacctgttcaaccatcccacgaatgttgacctcaattcccgtgtggtctgcattgtcctaaagggcttgggtgaaaacctccgcaaaatcgccatgcacaccaccaatgaatttgtcacggcggcggtaaacgccaaccatgccgagggcgtggcgacttggtgctactttgacgagttccatatcctgctccgtgatccgttgacggccagttactttgtggcggtctggaaaatgctccgcaaaaagggctgcgtcccctcggctctgacgcagaatgtgaaagacctgctggccagccgggagatcgaaaacattctggacaacacggatttcatggtgttgctgtcgcaggcgcagagcgaccgtgcgatcttggcaaagcagctcggtatttccgagcatcagctctcctacatcacgcactccaattccggcgagggcttgctgttctatggaaatgtcaccatcccgtttgtagaccgtttcccccgtggagagatctatgacctgctgactacccgcccggaggatcttgcccatgagcgaacagacgagtaaccccacttcgggacaaaatgtcccgaagtccaagtttcggcggaaaagccggcaagagcaaacggcggcgtccaagctgcggatggagtgccggggcgagaagctggacgccgcccgggagaagctggcaaagcagaagccgccgaaaaagcccggtgcggtcaagcgccttacccacgctgccggacacggcgtccacggctttgtgcatggcaaactctatgaggtcgagcatgaaaatgtcggcacagagggcgcacaccgttccgagctggtagcagagtccgtgtaccgctttggcaggcgcaagctccgcaaggccatccgggaacacccggcaaaggccgtggagcgtgccgagagcaagcacatcaaggccacggcggattattactaccgcaagaccgtggaggaacacccggaaatgcaggatggcggcgcggtgtcccggtatctgcaaaagcagaagatcaagcgccagtacgcaaagcaggcgcgggaggctgccagacagaccgccaaggccgccgagggcacggcgtccgtcactggtaagttgacggaaaaggtgtccgcctatattaaggaacaccccggcgggctgctcctgctgctggcggcgtttctgctgctggtagtactgcaatcgtgtatgtcctcgctggtaacggtgggcaacggcgtggccggagccatcggcgcgtccacctatgccgctgaggatgctgacctgctgggggcggaggccgcctactgcgctctggaggacgagctgcaacgctacctcgacacctacacccgtacccatgactatgacgaatatcattttgacctcgacaccattgaacacgatccctatgtgctgctgtccatcgtttgcgcgctccatgagggcgagtggacgctggacgaggtgcgggggacgctccaaatgctctttgaccgccagtacattttgaccgaggatgtggtggtggaggtgcgctaccgtaccgttacccggacggacagtgagggcaacaactatgatgttgaagttccgtacaactattacatctgctatgtcacacttgaaaacttcaatctctcccatctgcccgtttacctcatgggcgaggaaaccctgtcccggtacgccctctacatggcgacgctgggcaaccgtcccgacctgttcccgtcctcgccctatgtgggcaagtacaccagcaagcccccgttgcatgagatcccggaggactaccttgccgatgaaacctttgccgccattctaaaagaggcggaaaagtatgtgggatacccctatgtttggggcggcagcagcccgtccacatcctttgactgctccggcttcgtcagctatgtttacaaccaatgcggctgggacttcgggcggctgggggcgcaggggctatacaacatctccgcacggacaagcagccccaagcccggcgacttggtatttttcacagggacttatgatacgccggggatctcccatgtgggcatctatgtgggcgatggctggatgcttcattgtggcgaccccatcagctatgccaacctcaacacgagttactggcagtcccatttctacgcctacggaaaattgttttgacaggaggttttttatggctatctccaaaagcgcgaaaattcaggctgagatcgaaaaggtcatggccaagatcaacgagcagcaggcacggctcaaggagctggaacagaaaaagctggaggccgagaacagcgagatcgtggagatcgtgcgcggcatgagcgtttcgctcaccgacctgcccgtgctgcttcagaccatcaagagcggcggcactttgggacagattgtcccgaagtccgattccgcggataaggaggacagcgaatgaacaagtggatgaagaagctgacggcggcgctctgcgccgctgttttgatgtgcggcatggcggtcacgacctacgccgggggcggtgaggaatgggatggccttgccccggtagagccgctgcccacagaaaccgttgaccccggcgagggcttcaccgaggacggcaaccttgtgacccgtgacctgctctacgataaggccaccaacaagcagttcatcacggtgcagaccagcggcggcaacaccttttacatcgtcattgactatgacaagcccaccgacgaggacggcgagcagtaccagacctactttttgaacatggtggacgaggctgacctgctggcggcgatgcaggcggcgggcgatgagctgccggagtgttcctgtgccgacaaatgcgccgtgggcgctatcaacacggattgcaccgtctgcgctgtaaatatgggcgagtgccagggcaaggctcccgagcctgcgcccgtggtggagccggagcctgaccccgagccggagcagtccaaaagcagcagcgggacactcctgctggttctggccgtggcggtcatcggcggcgcggcgggctggtatttcaaaatctaccgtcccaagaagcagcaggctaccgacgctgcggaggactatggcgacgattatgacgataccccgccttgggaggacgaggacgaaacggaaagcgagggcgaggaatgagatttaccaacagtccttatgaggactttatgaaagaaaagagctacttcaagggtgttccgctcagcctgccgcccaaaggctcccgctgtgacggctgctcctactggcgcgggatcggttgcgtgttctgctaccgggaacagctcaagtccaagacagggggcaaaaatgagccgtgagctgacccggcaggaaaaaacggcgatccgtaagctggtgacaaaatggtgcgccaactacgataaagattatggctgcctgccgctggactgtccctgctatatgctgggcaagtgctggacaggcgcttattgccgctatttccgttcggcggtgctgccccttgatcccgtgctggaaaggtcgctgaccgtggagcgtatcacggaagcccggccttgcccggtgtgcggcagggcttttcttccggatgggcggcagcggtactgctccccggtctgcgccggggctgccctgcgggagcagaagcgggcgtatatgcgccgcaaacggaggtagcgcgtggaaaaatagccccggaaaacgcctgcatttacaaggcttttccggggcgcttttggggtgggcggtatgttttcctgcccgcccctgtttttgcagaaatgctttccacatccaagcgccgagctttgggacattttgtcccgaagtcccggctgaaaggaggacttatgcctaaatattatgagatcagcgaggcggcggcaaagcgggcaaaggacatgaacagctattccgactatgcccccggctcggccacggcgggctaccgggcgatggtggatgaagcctatgcgctggcagagaagcagaaggcacaggccgatcccatgtaccacgataagatcgatgcccttgttgaccgctacgcccgcaggctggcggaaaatctcaatgagcgcaacgccattgatgcccgtgtgccgtccattctaatcaccgggggcggcaatttccccgtggcgaaaaaggtcaagcagaacgccgccagggatcgcaactacggcgagtacgccgaaattgaaaagctgctggacaagatccgctccacaggcaggggcggtatcagcgccgacgatgaccttgccgtggaaaagctcacgaaaaagctggagggaatggagtcccagcaggccatgatgaaagcggtcaatgcctattttcgcaagcataagacgctggagggctgtcccgagctgacggcggaacaggtagaaaaggtcaaggcgtccatgtcccaagactggcgcaaagaccccgttccgtttccgtcctatctgctcaccaacaataacgccaacatccgccgtgtacgccagcgcatcgaggaactgagccacaaggcggagtttgtgggctggacatttcccggtggggaggccaaggtcaatgaggcggagaaccgcttgcagctcatttttgcggataagccggacgccgatacccggcaggcgcttaaaagcgaaggcttcaaatgggcgcccagccaaggggcatggcagcggcagctcaatcagaacgccatccgtgccgccgcaaggctggacttcctgcgcccggaggatggcaaaagcccctatcagctccagccctttgcaaaacgggcggaaaaggatgtatcacggtgaggagggtatatggacaaaaaccaaggctatgagatcatcaaggccgtcatgctggaaaacggcaggggctttgcgctggggcatcatcctaccgctccctcgccctatgtcacatgggcttgctacgatgacaaggacggccagcggcagtatgaatgggggcattacggcagcgaccgtgccgctttggaacaggactttgcggcgcgggtgcaggagtaccagcgcctttacaatgtcggtgtcaggcgggtcgaggctcccggcctttacaagtattattctacccagcgtcccgtggacatcgggacatttcccaagccgccccgcaacgccccagatgagatcgtcaactacgatcagcgtgtcccggttgaaaacggatcgtttctggcgtgggggcatttgacctacacacggccattgaccaagcgacaggcgtctgactatgagctacggcctgcgcccgacaatcccgacagaccccgttcgatccgggagcagatgaaaaccgccgcaaaacaggtcgaggctgaccgggggcaagccgccccaaagaaaaatgcccctgaccggggcgacagataggaggacatttatggagcaggaacgcaatcccaacaagaacgccgagcttgcgatggagcagaacgggaacatgatcgacggcatcatcaacaatctgcctgtgccgcccccggcagaaaagccgctggacaaggtgcgggaacacccgcccaagcgccgcagccgggagcgtgaggagcgttgacaaaaaagcggcggcgctctgtccatcttcatgtgatggtgacgccggaggaacaggcattgatcgctgaccgcatgaccgaggccggaatctccaacatgggagcttatatgcggaaaatggcgctcaacggctatgtcctccacgttgacctctcggacatccgggagctggtggccttgcagcggcggtgtgccaacaacctaaaccaagtggccgtccatgccaacacctacggcatctacccctcggagatcgcggcgctccaaaaggactatgccgacctttgggagccgctgtccgagctgctgaaaaagctgtcggctgtggtgagcctatgatttgtcggggagcggccttgtgccgttccccggctttcacgacctcgggacaaaatgtctcgaggtcgtgaaagctcgacatccttgtgcgcctattttcccagaggtataatatgggtagaaggacaaaccaacttgattttttgatggaggtagctgctatgatcgttctcaaaatccttgccgcccccgtgatggtggcgctgtccctgctggccgctatggtcacattcctgttctgcgtggcgtccgccgtatgtgagctgggttgcatcgcgctgacgctgctctccctgatcctattcatcggtgggcagacggtgggcgggatcgtgttcctcgtccttgcgttcctcgtttctccctttggcgttcccgctatcgctgagtggctggtggacagactgcactctgccaagtttgccctgcgggatttcatcaccggctgatacttcgggacaaaatgtcccaaagcaggaacaacggtggctgaccacagccgccgtttgtcatatcaaaaggaggactgcctatggccacaacctatttcaagaagcacaaaatcagcaagggcgaaaccatcgcacagtccttgaaagaacggtttgactatggtaaaaacccggacaagaccgagggcggcgagctgatttcttcttatgcttgcgaccacatgaccgccgatgcggagttcctgctcgccaaggccaagtacaaggccaccacgggccgggagcagcggtgggacgcggatgtgctgtgctatcagatccgccagtcattcatgcccggggagatcacgccggaggaggcaaaccgcatcggctatgaaacggccatgcgctggacaaagggcaagtatgccttttttgttgctacccacacggacaaggcacacatccataatcacatttattacaattcgacctcgctggactgcacccggaaattccgggacttcatcggctctggccgtgcggtgcggcggctctctgaccgcatttgtcttgaaaatgatctgtccgtcatcaccaaccccaaactgcacagcaggggacgatttctccattacggggcatggctggggacggagcggcagcccccatacaaggagcagctacggcttgccatcaatgaagctcttgccaaacgccccgccgattttgatgctttcctccggctcatggaggcgtccggcttcacggtcaagcatgggcgcggcggcgcaatttcttttcttgttccggggcaggagcgggcgacccggctgcgggcatctaccctcggggacggctacgatcccgaggacatcaaggcggttatcgccggggagcgtccgctcccggatcagtctgtccctgcgcctgttgtccttcgccgtgtcaatctgatcgtggatatagaggaacggctgcgctctggtaagggtgctgcctatgcacggtgggcgaaggtttacaatctcaagcagatggcggcggcacttcaattcatgcaggagcagaacatcaccgagtatgaccagctcttcgccaaggccgagaacgccgtttcccattttcatacgctgacggaacagcttcggcagaccgaggccgacctttcccatacctccgagctgatgggagccgtggtgcggtacgccaagacccgccccatctttgacgggtacaaggccgcaaagtacagccgaaaatatcttgccgagcatgaggcggagctggcggactaccgggcagccaaggctacaatgggagagttgctgggcggtgagaagctgcccaaaatggcagagctaaaagaaaaacgccgccaactggcggcgcggaaaaaggcactctacgctgactaccgaacggcgcaggagcaaatgcggcaggccgtggcagtcaaggccaatatcgaccatctgctgggtgtcacggacggccagcacaaaaaggaacaggagcgatagcgaacggtgacgcaggcaaattactttgggacaaaatgtcccaaagccgggtttggggaggctccccaacaagcatttttgcagcccgccgggatgcaaaaatagcaagtgtggctacacttgccctgcttgccgttagtgcgtaccccggaaaccccatgaaaaaacggaggcagcgccgtttcttacgctccctccgtttctctggctttttgtattccctctgcggtggcttccatgatcgtcaattcattctcgtccattgtgtttagcatcctgtcaatgtgctggcggcaatcactttcttcattctgtttgtcaggatagaagaattgatcaacggaaatatccagcaaagtgacgattttataaaaggtattcaagctcggatgctgaccacgattttcaaaatacataatggaacgaggtgtacgatcaacgagctgcgcgaggtattcctgcgtccagcctttggcttctcttttgcgcttgatctcccggcctaatgcgtggaagtcgagccgtctttcatcttggtacattctcatatcacccatatattattctacatttcgggtttggttatgagaacgaaacacgattttatgttttggtagtattttattttatcagcgttttcagtaacggcattgatagattgaaagaatggcagtaaaataaatgcggatacaatttcagactccataatagatacatatttctctgctatacttgaaaaattggaggtgggacaatgcagaagattttaattgtcgaagatgatattgacattcaggatatattgaaaaatcatctgattgatgcgagatatgaagttgctgttgcttctgacggcgtggcggggattgcaatgtttgatgatacaatcgaccttgtgctgttagatattatgctccctaaaatcgacggctatggtgtatgtgaggtcattcgcaaaaggtcacaagtccctattattatgcttactgcgctttcggatgaagaaaaccagttgcggggttttgaacagcagattgatgattacattccaaagcccttttcgcccaaaatcctgctgtgcaagattgcggctattcttcgccgtaggactgcggaaaatcaaaatcaatccctgcttacttataaagagctgagtatggacgttgacggattccatgtatatcaaggcggaaacgaggttgttttaaccagcaaagagtttgcgcttcttaggcttatgattgaaaatcaaggaaaggtttttactcggcaaatgctactggaccaattgtgggcggaggatttggaggtcgaggatcgaatcgttgacagtcatataaagaacattcgtaaaaagttaaatgctgactatataaaaacaatcagaggggtgggatacagaattgacaaagtacattaagcaacggttatccgtcaagatttttataattacatttcttctactgggtacagcttgtggtggaacatattttttcatttcaaaactgttacctacgacatactccaatttgataaatgcgactacggagaaagccgccatgcaccttgccgagcaaatggcggattttaataatatagacgattgtgaaaatgaattggctgatttttcagcgaaaacaaatgccgctttttggattgaggacagcaacggcaatattatctatccgaatgaagtggctacggaaatttctactgtttcagcagatcaagcagttacatttgatgaagatgaatcgttcatagatatgcagctgtccggggcaactacaacgaacttttacccaattactctaaaaaacggggctgcttatacgctggtagttcaaacggatttgtttgtcgtacagcaggcaacaaaagtattgctgtccatatttccgtatgttatcctaatggtctttctgctttctctcctttgtgcagggctctatacacggtacatcactcgacctattgtgcgactgagcaagatttcaaagcaaatggcggaactggatttttctggtcaatgtactgctgcgcgggaagatgaattggggtgcttggcacaaaatctaaattcgttgtcggcctcgctctctactgcgctgaatgatcttcaaactgcaaaccagcagctcaagacagatatggaaaaggaacaagcattagagcaacagcgggtagaatttttctcggcagcctcccacgaactgaaaacaccgctgactattttgaaaggtcacttgtcggggatgctgaacgggatcagcggctatgaaaaccacacagagtacatggagcgttcccttgcagttgttgacaggatggaaaatctgataaaagaattgttgtatgtttctaaaacggagggaactcagaaatccgcatataaagtcgttgactttgcggaagtattccgggtacagcttgccacggtttcagatttatcggaagaaaagaaacagcaccttgaggtcaatattcctgaccgactttactgtgaagtggaacaagtgcagatggaacgggcaattcagaacatattggtaaacgcaattcggtattctccaagtaacgaatcaatccatataactttgtctgaaatacacggtacgattcgtggtgaaattgaaaatacaggtgtccatgtgcctgatgatgccctcccgcatttgtttgaagctttctaccgggcggacgcatcccgtaaccgtaatacaggcggaactggattagggctttatattgttcgcaaaatcatggaaatgcaccatgcaaagtacagcatcactaacacaagcaacggcgtaatgttttggtttgaactgccttgcaagcagccaatagataactccatctaaaatccataatctatgcaaactatatccaagttgttttgctatattttagctgtccttaaggggcagctaaaatttttataaagcgaggtcttatctatgaagaacaaaaaaatattagcagtgggcttgtgcggagcaatctgtttgagccttgccggttttacttatgcaaatgcactggcttcagacgcaccaaagaatttggcatctgaaactgaaaacacatccggcgtcgatattctctatcatgatacggatggtggacaaatcagcgttgacggtaaaaattgggttgccgaggcagattatgagaagaacaatgcggcaccggatgtgcagtggtggacagccgaagagtacgaggcttggatgaacgaacagaaaaatgaaatggaagcgttgattggaactggagatggttggtatgatgggcaaggcgtattccatgaatttacgcaggaaagcgtagatgctatgatggacagctataaggaaactctggaaagtatcaaaaagggagtattgtattccaaagacgacggtgacggcgatacctactccatgattccacctactgaagatgtagtttcctcttatagtgttgatgtaacaaaagataatggaaaaacagtacacattggggattattccacagttgaggaattagataaagccatttctgatgcagttaaaaatggtcaactcacacaagaagaagcggactccgttcagaaataatgactaagccattctgccggacgacggcaaaagaaaaaaagccgtcgtaatgcagacaaattgacacgcccatttgaaacggcggctttgattttcagagccgccgtttctttgcgcctacacacaaaccaatgacgacccattgaaactgtaaaggcacggtggcctatggaggtatcgccgtgtccatttttgctttctgtaatccccctaatactctgcggtcaaaaaaagcccatgccccgcaacggagtattctggatatgaacatgaaataaataagtacaataataacggtaatatttcgtgcgcccgcatagcgtcatgctgtgcgggcgtttttatatgcctgcaccttgggacaatttgtcccaaagcggccagccccggctgccgatccccgccgttcctccgttctgttcacccacccacacatgaaccgaatggaggaaatacaaatgacgaccatcaatctgaaggacttttacgcttggtacacccatgatgaatacatcgaagtttccgacgaagtggccgccgaactgaaggcgggcaagctgtatgaggcagcctatcagcggcgcacgacccgcaacaaggcgcagtattccctcgactgtgacgatgggatcgaatactcggcctgcctgcatgaaccgacgccgcaggagcttctggatcgcatggagctgttcgtccacctgtggaatgccctcaactctctgccggaggtgcagggcgtccgggtagaggcgcatttgatcctcggcaaaagctaccgccagattgcccgggagcagggtgtggacaaaagcgccgttcgccattccgtcaaaagcggcaaggcggccatgagaaaatatttgaaaaaatttctctaagggtatctccatttgcccgatttttgtccttggtatatgagaggtagttttcacctctccgcagcaaagtagttgatgctccgtgacggatcgtcgctatccgctgtgagggagcgccgcattgaatacgagctgtcttatgacaggccaacaggagcgggtgcggcgctcccaactgtcaaaaacaccttgggacatttcgtcccaaggtcataagtcacaggccagcgcttttatgaggcgctggcctttccctgttgccgagaattgaaaaggaggtctttatgcagcagagaaaacaacataccgcatttgctgtggatggctacgccatcaccgccagcttcgcagactgcaaaaatgcggcagcgctccatcatgtaaagcagattttactatcttcctttgccaacaatacggcaaaaaatagctccggcgacatccttgcaatccctcccgaacagagggataataatagtgggggtagtccctatgtaccttgaaaacttcatattccccgcgtattgattgcgttttttcattgacccatcgacaaatgaaaggacggatcaatatgatgatggaaaacagaatgatgacaggtaatcgagtcgattgcctataccgcgtgtccaccgacaagcaggtggactacaatgacaaaagccaagccgacattcccatgcagcgcagggagtgccatcgcttctgtgaaaaaatgggctggacgatcgttcatgaggaacaggaggacggtgtgtccgggcataaggttagagccgaaaaccgggacaagctgcaaatcatcaaggaacgagccaagcagggaaaattcgatattctgcttgtgttcatgtttgaccgcatcgggcgtatcgctgacgaaacgccctttgtagtggaatggtttgttaagaacggcatccgggtctggagtacgcaggagggtgagcagcgttttgataatcacacggacaagctcaccaactacatccgcttctggcaggccgacggcgaaagcgaaaagacttcaattcgcacaaaaaccgctctcggccagcttgtcgaggacggcggtttcaagggcggtcttgctccctatgggtatgaccttgtaaaaagcggacgcttcaataaacgcaagcacgaggtttttgagctggctatcaatgaagccgaggccgctgtggtacggattatctttgacaagtatgtgcatgagggtttcggcgctcaacggatcgccacctacttaaataacctcggctatcgggcgagaacgggtaaaatgtggcatcacgccagcatccggggtatcatttgcaatctgacatataccggggtgcttcgcagcggcgaaagccgctcccaaacgctgccccacttgcaaatcataacgccggagctattcgaggccgcacaacacattcgtacctcccgtgccaactccgccgaacaggaacggcgtgtaccgctgaatacccgtggtcagtccttgctggccgggaatgtcttttgcgggcattgtggctcccggctggcgctcaccaccaacggcaaggcttatccatgcaaggaaaatgctcaccgcattgtaaagcgtgtgcggtatatctgctacggcaagacacgcaagcaaaccgaatgtgatgggcagactggctacacagcgcatattcttgacggtatcattgataaagtggtgcggcagatcttcgagcgaatgaaagcaatccctaaaagtgagatcgtcaatatccgctatcgtgaaaagatggaagaacggaaaacgcttctcaaaagtgcaaaatcagactacgccaaagccgccgccgagcttgatacgctccgggcagaggttattaaatccctccggggcgaaagtgctttttcgcaggatttgcttggttctttgatttctgactgtgagacaaaatgtctcgaagttcagcacactatggaggcggcgcaggcggcctacgacgagggacaggccatgctggacgccttaaacgctcagtatgacgatattatttcatgggcggatatgtacgacagcgccagcacggagtcaaagaaaatgattgtgagctgcctgatccggcgtgtggaagtgtatcgagactatcggctgcatatcgacttcaacattgactttgagcagttcagcgctgggctggacatttcggcaatcgccgcataagaaaagcccgcttcaaaagagaagtgggcataaaacaaaaaacttgcttttttcaaagcaagcatttattaagaatactcagcgcacccgattggtggagataagcgggatcgaaccgctgacctcttgactgccagtcaagcgctctcccagctgagctatacccccgtataaggggtgcgctgagtaatttcttattcaattagtgcgggggttgtttaccgcttcaaccgggctcccagctgagctacgcccccgtttggtacttgaagattataacacaggtggttacaaatttcaagcccttttttgtttttttattgatcttttttcgcaaagcgaaaaatatcgccgtttattcgatgctgtgaatgcggtatgttccgctttcggcagctttgtaagcgaggtcatcttcaaagacatagccgctttcaagacgaataacgccgtgcatggtgcttggcagcttgaccgtcaacacaatgacgtcgtcctcatccctctcccatgcggaagcgatgcggcctgcgggtgcaatgtggaacgcttcggcatgtgtgaggcgcgaaatgaacgacgggcggaaatccacctcattcggttcaccgtgcggcgccatgcggataccggagagcgcctgcgtaaaccagctgctgatgtcgccccagaaatggtgattcagtgagccgatgcgatcactgccctcgggctgaaacacctcccacagcgtcgtggcgccgcgtgcgatccagttgccgtaggacggataatccgggcgggtaatcatggagaacgcgaggtcactgtacccgaactccgtcaaaacatggaacagcacacgtccgccgagcacgccgacatcgaggtgatactcctgctcctcaatgaggttgataagctgctcaaacgctgccttgcgctctgcgggctcgaagatgttatagtagatggccatggcctgcgaagtctggcagttgccagcagcgagcatagtgttctcgtcgatgagatacttgcgcacaacagctttccaacgcttagagagcgcgcgggcaaacgccacctgctccggcatatggagcttatcgaacagaaacgcggctttatccgccatgtcctttgagagcaccgtatcggtgaatgcgagcggcgatttatattcgtgcgcttcgcgtcccggcgggcaccagtcgccaaggccgatggcgagcaggtcgtgctcgtccatacgcgttgtgaggtagtgcaggtatttgatgatcgccggggcgcacagtttggcggaatccaaatcgccgcggtactgatacagtctgtacggcagctcaatgagcacgctatcccatgcggggccgttgccccaagcaaagccccagccgcttgtgggcacgatgccgggcagtgcgccgttattatcctgtgctttcacaatggcacgcagccattcgcggtagctcttttctgcgccgaggttcagcaaaatatgttcggaagaaagtgccgcgtcggccgtccagccgtttttctcgcgctgcgggcagtccgtcgggaaataatagaaattcgttacgtccgattggcgcgtcatttgctgtaatttgtttgcagtctcatccgagcaggagaaaccgccgcgctcttcgagcagcgagtgcatctcaagcgctgtaagcaggtcttccgtcgcttgcgcttcggtgatgccgctgacgagcacataacggaaaccgtgatacgtaaacgccggtgtatatacctcttccccgtcgccgcgacaggtatacacgtctttgtggacatattcgaggtcgcgcgcccagtgctcacgcttaaaccagatattttccacgtccggcaggccgtccttcaagtgctcgccgtgtcgaagttctatgcgctggtcaagctcgccgcgcacgcacaagcggcacacaccggcggtgttgataccgaaatcgtacagatagcccttttccgttttcgtaacggagatgggctttaattcatttacgatgtcaatcggctccgcggtacacaggcgcttttcgccgcgcggctgcggggcgcgttcggcaaatttccatgcactgtcgtcaaatccgatagtattccagccgggtatttccaagcggccgtcgtaaatttcaccgaagcgatagtcatcaaacagcagcggagacgattccgtgcgccatgtttcgtcactttcaatgcagtgcgcctccccacttttgtccgtgtacgtcaggcacagcgccatttgcggtgcggcacggaatgcagcgatgtcgaaatcccagatatgcccgccggggttattcgtaaagccgttgccaagccacacgccaagcacattttcgcccgcgcggagcgtgacctcatacgtatcgtaatacacaaggtcatcgggattgttgatgtacggcgcaagacgaccctttgtgatgcgttcgccatttaaatacagctcataaaagccgagcgccgtgatgataacgtttgctttggcttcgtgatcggcttgaaatgcgcggcgcagatacggcgcaggcacgtggtgttcaaatgtattgtaagcttcggatgcgcggataaaagacttcggaaattccattttaactcctccaaaaaggactgaattcctcttttatgactgctgtttcgcttttgattcggttgtgggatctacgtagacggtcttatactgcacatagatgaccatgccgggctttgcgccctgcggctttgaaacatagcggatctgcgtgtaatcgaccggcacttgcgcggaatccttcgcgcggctatgctgcgcggcaagcacggcggcttcctccatggcggtctccgtcggtgccttgccgtctgtgacgagcaccgtgtgcgagccggggatgttcttcgtgtgaaaccaaatatcgttgttgtttgcgtccttcattgtcagcttgtcgttctggcggttattgcgcccgacaagcaccgtgaagccgtcgctcgtcttgaacttgagcggtgcggaaagcgcaggctgcttctggttctttttgcccgccttgcggcgcacgtagccctgttcggcaagctcggcgcgaatctcatttaaatcacgttcgttttcggcgagggcaagcgattcgaacacactgtcgatatacgtcagctccgtctgcgcaaggccgatctgctcagtcagcttttcctccgctgttttcgccttgcggtagtttttatagtatttctgcgcgttctgctgcggcgtgagcgccgggtcgagcgcaatctcaagctccgccaaattctcatcatagaaattttgcagctttacggatgtttcacccttttgaatcgcatacatattcgcactgagcaggtcgcccttgatgcgcagtgtgtcgcgctcggcgcatgcggaaagctctgcctgctggttcgcgatcttgcggctcaaacggtcggcgtgattcgcaagcagacgcagaagatcctgacttttcacgcgcatacgctcaatctggtcgcgctcggcgtagaacgcgtcgagcatttcggaaaagctctttttttcactgaccgtcatcgcgttgccgtactgacgaatgtccataaacgcgaaatctttcggtttattctgcgggtcgatgacaatatgcggtgtgccggaaacgtttttcgccgtctccatcagcgtcgtcacgtacatctccgtacggcggcgctgcgggggcgtcatgcttttcacatacacctcatgccccagccccgcgctgttttcgacttcgcgcgcgatgatcggcgaaatgccctgcaaaacagacatcaacgctttggaaagctccatatcacgcggtaaagcatcgatacgcgccatgatctcctccaccgtgcaggtaagcatggaaagcttatcctgcgggggcggcaagcggtataaaagcccaggcaacacaagacgctccgaagacatctcggcatccacgcgttttagtgcatcgatgattttgccgttttcgtcaaccaaaatgatattgctgtaccggcccatgatctccacggcaagcgtcagttccacgtggtcgccgagctcgttcacgctgtcaaatttcagcatgagcgcacgctccaagtcgggctgcgtgatctccaaaagctttgcaccctgcaatttcttgcgcaaaagcatgcacagcatcggcggctgctgcgggttttccaccggaatcgtcgtcagattgatgcgcgcactgtttgcacgggcggaaatgagcagcttatatgcggcgctgaagccgcgaaatgcgagaatcagctcatcgcggttcggctgaaacacacggtctacgcgcgtgccgagcaaggacgtgccgatttcctcttttaaatgtcgtaaaaatacaccatccagtgccattttataaaaccatcgcttttaaaaagcgcctttctgttctgtttcaaagcgtttccatcggcgggcgttcgctttcggaaacgataaattccacacccgggcaggctgtgtcaagataagctttcagccgctcgcggtacggcagctccgtgtggtagtgcccggcttcatacaaagccagtcccgcctgctgcgccgcgatgacctcgtggtgcttcacttcgccggtgacgaacgcgtccgcgccctttgcctgcgctgcaagggcatagtctcccccggcaccgccgacgaccgcgactgtgcggagcattttgctgaccgccgtgcagcgcaccgccgaaagccccagcgcttccttaatgtgcgcagcaaagtcctccgttgtcatttcttccggcagctcgcccatgtaggcaatgtccgtttcgccctcttttaaaatgccgcggacgttttgcagtcccaacttgcggcaaagcgcatcgttcacgccgtagggatatgccatatcgagattcgtgtgcgcactgatgaccgcaatgccgctctgcacaagcgcatagatgatgttctgcggccgcacggtacgcagcgggttaaagatcaccggatggtggctgatgatgagctccacgccgatgcttttcgcctcacgcaaaacgcgcggcgtgacatccaagcaaagcaacgtctttgtgacgtcggcattttcatcaccgatcagaatgccgacgttatcaaaatccattgccgtttgaaacggcgcaatacggtctatggcatcatagatctctcgaacggtcatgcgttctcctcctcgccgtacagatctaaaagcatttgcagcaaaatttccagcgcgctgctgtctgcgccgccgtgccgcatgcccttgatcttattttcgatgttgtgccgcacgcttttggcataacgtgcgctgaacggactgccgggtttgatctgtcccatatataaatcaatcagctttaaattatcccgcttttgatcggtatagtacacggacatcacggagtaaattttatcactatctactaccgcttcttcgcggtcaatcgtaaagcccagcgcggcaagtccctctctaagctgcatggcggtcgtcatcggctgcaaaacaaggtgcttatccattgcacacagccatggcgcttccgagatgatacgcaaaataagttcaccgcccatgccggcgatgacaatgtcctccgcctcatccggcagcaccccgtgcaggccgtctccacacacaaagtgcattttgtccgccacaccgcagcgcgaagcattgttcatggcgctttccagcggccctttgtgaacatcaaccgcaacggcaaacggtatcttgccgctttgcagcaaacagaccggcacatagccgtggtctgtgccgatatcggcaagttttttgccttcccgcacaaaatctgcacatttttgcagacgcgcgccaagggtgggtgctcgttctattctgttttgttccatgagttcctccgaattgccggatcggcgaatttgcttattttgtggcgaagcgcgcgttaaatgctgctgcgaactgctctgcatccataccatgcactgcacaggcctctgcgattgtttcgccgcgtgcggcgggacattcaatgcaatgcatgcccgcttccctgaaaaacgctgcggcatctgtctcccgccgcagaatatcgccgatgatggtatcaaccgtaatgtgcataaaacatccccctttaaagatatttaaccaatttaattatacgatgcataagtttgttttgcaaggtatatcacggctttccgcgtaaatatcgtaaatatttataaagcaatatttgtctttgaactgcaaaatgcccggcagtctcccgccgggcaccgatatgcgttttaaagcttatctttcttccttcatgcgtgcaaagcactcgctgcaatagaccggacggtcctcacgcggcttgaagggaacggttgcttccttgccgcaggcggcgcagacagccgtgtacatctcacgttccggctttgccgcattcttgcggttctggcggcatgccttgcatctctgcggctcgttctcgaagcccttggatgcgtaaaattcctgctcgccggctgtgaatacaaattctttgccgcattccttgcagatcagggtcttgtcttcgtacatgtgtttttacctcgctttggtcataatagaatagaatgagttttgcccccggcggatttgcaccgcttcattgaaaaacaacgccatcaactgtggaagggcatatacatataaatataaatatatagaaaaggtatccgcgcgaaagtcatcctttggcgtcattgtttttctgccgcagctttttgcgtacacgcgccatcgcgttatcgaacgcacgcgccgaaatgccgagttttctctctgcttcctgccgcttatagccgccaagatacaaagaaagcacacgcagttcaaaatcggaaagtgaaatatggataacagaaagcagccggtccatctcgtcgcggctctccaaaagcgtttgcgggtcggaaaggcggtctgccccaaggtcttccatctcctcaatgggcacagcgttattgaggaaagaatttttcagactggagctacgccgcacggcgctgacgattcgattgctgatacaccgcccggcatacgtttcaaacgacgtcctttcgctcggcttataggaattcgccgcgtctaaaagccccaaaagcccctcctggtacaggtcttcccgctcaagggaaaaaatctcgcgaaaactgcacgccttgatgcggatgaccttcaggtagcgcgccgcaagctccgaaaacgccgcgtcatctccgttttgaaaacgaagtgccagcgcctcatcgctgagcggtatactatttttctgcccggtttcctgcatgagaacgctccaaatgactactgtttctttatcatactccaaacccttacagaagtcaagacaaatcttcctatactgtacaaaaatgctcgaccgaatttttacatttatatctatcctgcaaacttaaacttctattgccaaaattcgataaaaagtatataatgcagacaagaactgcgaaaggcggtaaaaatatggtatcaaaagcattcagcatgggacttttcggcatgcacgcgttcaaagtggaagtggaatgtgacctttctgccggtctgcctgcctttgaccttgtcggcctgccggacgccgccgtaaaggaatcgcgcaatcgcgtgcgcgccgcactgaaaaactgcgggttcgatttccccgtcagccgcatcacgatgaaccttgcccctgccgacgtgcgcaaagagggccccgtttacgacctgccgctgctcatcgctttattaaaagccaccggccagctgaatgtcaacacggatgactgcatttttgcgggcgagctttcgctttccggtgcgctgcatcctgtgcgcggtgtgctctccatggcgatagaagccggaaaactcggctacacgcgcatgtttgtgcctgcggaaaacgcctatgaagccgccgttgtgaccgggctttcggtctaccctgtgccggacgtgttcacactcatcgaccatctgcgcggtacaaaaccgatcctgcccgccgcgccgtaccacagcgatccgaaaaatcagccgccgctgccggacttcgccgatgtaaaagggcaggcacaggcaaagcgcgctttagagattgccgcaagcggcgggcacaacgtgttgctcatcggctcgcccggttccggcaaaagcatgcttgcaaagcggctgccgtccatcctgccgcaaatgtgctttgaggaaatgatcgaaacgaccgaaattcactccgttgcgggacttctgccgagcaacaccgcgctcattgaaacgcgccccttccgctcgccgcaccataccatctccggcccggggctttcgggcggcgggtctatcccccgccccggcgagatctccctcgcacacaacggcgtgctgtttttggatgagctaccggagttttcgcgcagctccatggagacgctgcgccagccgcttgaggacggcgttgtgaccgtctcgcgcgtgaacggcacggtctctttcccgtgtaaatttatgctcgtcgccgccatgaacccctgcccatgcggctattacggtcaccccacacgcccgtgcacctgctcggagaccgccgtggcgcgatacctcggccgcgtttccgggccactgcttgaccgtatcgacctgcacattgaagtgccgccggtcgattttcgcgacctctcgaacaccgcaaaggaggaaagctccgcgtccatcaaagtgcgtgtggatgccgcacgggatattcaaaacaagcgttttgcgaacaccggcatcacctgcaatgcacagattccgccggaaatgctgcatgaagtctgccgcaccgcgcctgctgccgatgccctgctgaaaaacgcatttgaaaaattcgggctttccgcccgcgcctacgaccgtgtgctaaaggtttcgcgcaccatcgccgacctcgataacagccgcgacatcgaagcgcgccatgccgccgaggccgtgcgctaccgcacgctcgaccgcaaatattggacgagatagaattatacgaactaaaaagcagctcttcctcacggaggtcacatcgcgtcagctgtgaaaattctgccgtttacttcaatactccacttcctcgtgtttttccgttcatcccgaaatctccttcaaaagcgcggtgcagccttcataaacatcgcgccaggtctcttcaaaatcgccggtgtaccacgggtcagccacgtcgccgggacgattggtgtgctccatcagcaaagagaatttatgctccgggtcacctccgcaaatacgctgcatgccgcgcagattggagctgtccatgccgatgatgtagtcgaacttatcataatccgcacgcgtcatctggcgcgccgcatggccgtcgcagcgaatgccgtgttccaaaagcttgcgctttgcgggcggatacaccgggttgccgagttcctctcggctcaccgccgccgaagcaatctcaaatgcgcctcttttccccgctttcgtcacaaggtctttcatcacaaactccgccatcgggctgcggcagatattgccgtggcaaataaatagtactttaatcatcttttcatatctccatttaagtcttgtatttcttctcaaacgcttgatatttcagggttttccgacttttgagttttcctttcttttcaaggtatcttctcaaatcttctcgtattttcttatatttttccctgcaatcttggtaaatccgttggtaaagcaagcgtccttaccaacgggcttttttaactattcgctatccgatatacttcttcctttgcatcatcaaaattcacatgggtgtaagtgttcaaggttacactgatgtctgcgtgacccatgatatactgcaaggttttcggattcataccggattttgccatattagagcaaaaggtgtgcctgcatacatgaggggtaactttcggcatctggatgcgataaattttattatatttctgaataatatgctccagatacttttcccagtgaagggcaaccatcggcatatcgtttttatccagaaacaaaaatcctgcatatccttccaccatcggttcaacttttggtgtcttgcggttggcaatgattctgcgaaaacacgccacaacttcctcactcatcggcacatagcggataccgctttctgttttgggagcaccgatcacatacttcatctgggaagtccgctgaagctggtgatctaccttgatacgcttctggtcgaactcaagatcggaaaaggtcagcccacagaactctgagatacgcaatcctgtattaaaaagtatatagattgcatcatagtatcggcagaaatgcttatcatccttgatgaatttcagaagttcacgctcctgcttacgggtaattgcttctctggtaacagaatcgttgacaatcacggatgccagctcaaatccaaaaggattcttgcggatcagatcatcatcaaccgccatctgaaacgccggtctcagaacacctcggatagagtggatggaactgtaccctctgccatccacctgctgaagtttgatcaaccacgcctttgcatcagacaagcgaatcttgtcaattcgctgctttccaaacgcttctttattcagaatgttgatcacggtcttatatcccgccttggtgttatgaccgacacccgttttcagagaagtatatttctctaccaattcaactaccgtgtaattgccgccacgggtaacgatatggtcaaacagatccgcctgaatctgcttttccttctctctcagcgaaagctctcgcttcttatccctgggagtcgggtcattcttgtccaaacgccaactgtatacattcttctccttaccatcctcatcaatatatcggtaacgatacctcccatctgtacgctggtattcaccttcacgcaaaatccggtttcgattgtctcgtcttttttcgctcatggaatctctcctttcaagtaaggagagccagacttgtgataacattgtatcacaaatctggctctcagtatagttgtatcattggaaaacggcagttctgccgtattattttttcggaatttatactgcggtggcctgatccagataccgctcgaacttctcccgcttgatcagcgcccgatttccgttcataacatagaaatcttcgtgcgggttctggtcgatcagcatccgcagtttcccctcgccgatgtgatagtagccggctgcttcttcaatggtcagcgtgtatctgcgccacaccggaatgtcaaaacagttcttctcgctcacattgctcttgctattcgccataggcatttacctccatatatcaattcgttgtgcagggatgggtcgttccgacccctgcttttttctgtgctgcgttcatttcaatacctcccaaagccgggcaagggagaaacggaaacagaaaccggaaaccggcttctaaaaaccagattcttccttgcagcagttgtctttgctattttggtttttcttgaatttctttgttgcctttgtttccagagaagaaaaagccttgcggaacaaagcttttcccggaaaccgatatggcaacggactggatatgaaacaggaaaccatgctactttcttaaaacggcagctccatctggctgcattcttcctcagtcaattcacggaagccgtccaaggggcttgtcccggcttccaccgtttcgtttccacgcatccagcccctttgcttgccgtacttcttataacttctgggattgggataaggaatccagcctgtcacagactgattcataatctcgttgatttcccgtatctcccacgatttcggctcatcaaagcgtcccagagattcgtgatggagcagcttggaacagaccatatctccatcaaaatcgtccagaaacgcctgtatcacgcctaccttggtgtcctccggcatgaattgcttttgcagtaaaaccaactgttcgttcatttctctggacagtttcagctgcaccttttctcgccggtaaaggaccacggattctgcccatagctgatccatatactgccgggatgcagcttcatcttctagaatgtgtacctctgcccgttcgggatgtaccatgatgggaagaaagcggcggtttccgctgcgatcaaggggaaggaagtccagcgcattggaagtaccgccaaacacacattgccgtagcctatcctccggctccgttgcatagggaaccttgtaggtttccttggatcggctcagaaacgatttaatatcctcgatgctccgtgcgtttgctgtggcaatcatttctgacatttctatgatccagtgtccctgcatcttgcggaacacattatcgtcatcaatcttcttcaggtcatcggagaaccactcatccttgcaagccagaaatcggaagaaggtagattttcccgccccctgtccgcctaccagacagagcatcagttcaaacttgcagcccggtctgaatacccggtgaatggctcccaacagaaacagccgcatgacttcggtgccatacgcacatatttctgcacccaggaagtgatgaagcacataggggatgcgttctgtgccatcccattccaaacggttcagatactcccggatcgggtggtattgattctggtgtgcaaccaccgtcagcgcccttcggatgcggttttcgttgttcagcccgtatcgtttttccagatacagcatgaggtaattgaaatccgtgtcactcatggcagaggcggtgcgttcccaccacaggggcttgcagatgtcaatgcgcccggtgaggatgttatagccgatggctccatgcagtaccggatcggactgaaagacctgatacacattctgcatggtattctttacctgccctttatcgttcacctccagaagatccctgacttcctccggggtctggcagagccggttctctgccaacatcttcaaattctctctcagctccggtgccaagctctgataatcgccgttcaagtttcatcacttcctttccgtattcttttataagcgccgcacgctcctcaatggaatcgtacagcagcacatccagtaaatactcgatgtggtctttcttttgcagggcttccacgaacaatggatgccatgtttcatcctccaggttcggggcgtatgcccgttcccaatgccggagcagatgaaaataatctgataatacccggaagcatctggcttccagttcccggtacatttgctcctccgatttctctctgatcgtctttttcactgtttcctttcttttgtaatgtgtataggggatttgaaagtccgcagccagtttttcggcggcggactttgcatctaacccatatagctgtgccgtaaaatcaatcacatctccatcggcaccgcagccgaagcaatggaatcgcttgtccactttcatgctgggtgttcgatcattgtgaaaagggcagttagcttttcctgcccggttgacatagatgccgtagcactctgctgcttgtcgggtggttacggtctgcttgaccgcttcaaatacattcattgtatcctcctttcggggaacaacaaaggcactcgacattttcgcagagaaaacggcaagtgcctgttagagttccatattctgttttttgtgctgccgagatttctgctcctgctgattgctgctctgctcttgtagaaactttatcttttccgtgacggagtgcttcggttcgggcttcttctcgacctcggactgctccggcatgaggactttgctgacccaatagcgaatatctttcatcggctgcaattcctccttggcggtggcaagctgtccggcaagctctgcgtaggtctcttgcagattgctgtactccgcttgcagggaatccagattgacattcaaatccacgccctgctttttgagatagcggaacgctttgttgaagctgtccagctcgtccttgtggctttctgcaaacgctgcctgtcgtgctttccagccgattttcagatacttgtcatgaaccgctttgtgggtctggcagtctgccacggcgttctgaatgccagtaatgaccttcatgcgggcggatgctttcttcatgtcggcatggatgctcttggacttctcactcatttcttgcagggcggtatccaaatcttccagcgtgaaaagctcatgctctttcagatagatgacggctttggagactgccttcaaatcatcagtcgtgcctttctgctgaccgtatcttgaccagtcgctgcgttctgcctttcgtaagttcagatagtcacgaagcagaataaccagatcgggcgaagtgctttttgcctgtgcctccacctctgcaaaggcttccttagttgcttccacaatgtctgcaatccagttccgcagatttcggatggtgctgcggatggcattcatcatatggttggcggctttaatatcacggttgagattgccgatgttggtttcaatgcccttgcgttccagagcgcaaacggcggctcccatgtggacggtcggaatcttatccagtccctgccgttcataggagcgcatatccactcgctcaggacttccggcaagctccagatacttattttgaacaagctcccagccgtgtctccattcctcggcatggtactgctcgttccagtcaacggtattctccttgtggcttttccagttgccggagggcagtctgatacgctctccgttctcgtcaaggtcgtaaaccttgcggctcttaggtagccactttccgttttcgtcaatggctctcatggtcaacatgatatggcaatgaggattgtgtccgggaggatctggatcatggattgcaaagtcacagcacattcccttggacacgaaatgctcttggcagtattcctgcatcatctgcggatacattgcggtcggggcttctctcggcagggcaaccacaaatcgccttgcaagttgggagttccattgtttctctacttcctcagctgcgttccaaagcgttgctcggtcggcatatccgggtggggcattggtgggcagcatgacctctgtgtagaccacctctttcttgtaaaggtagtttttcatcttctggtcgtactcggaaaacagcttctctccggcttggtaggcagctccggcaatagcagagctgcccttgcttcgctggacgatgcggatttccaaatgtggtactggcattttggtttgaacctcctttcgatggtattaaaaaagaccgatacttttcagcacggtcgggcagggggatattcacttgttgtcggggaatgattgcttgcaatcgttccccggcggcaagtccacaaaggggtagctggcaaagccagcgcaggggaagtgtagcttcctctggatgaatggagcaagggacttttgcggaaatcatcagctccatgcaatgggctttcggcagaacgcaatcaccatctttaggtggtgtataattgcgccctgtttcaaaacagggtttttagccctcgtccgcttcctgcgtttctctccggctctcaatcagcaaattcagcttcttttgaaccgcttcgctctggaagatgaaggtcagcagctccatcacatcctcatcggtcaggacggtcggctctttcaaaaaggtctccaacattccggcacgagtgcaaagccgatgggttctctcgcttctggtcagccgtttcagctcgctctgcaatcgcttctccttgtgcttggctgcggtcagctttttctcagctacatatttctgttgcttcaatttttccagctgttcattcggcattcgcatcaaccccgcttgacccaaacaatgtcatagcccagcgcatcggccagctccacggcttcgccgtagcgtaggctgccacgcttcaacttaccggacaaattgggaacgctgctgctccatccgtactcgtctgccagaaaatccaccacctcactcatggtcatgcccgcccggacgatgtaagacttgatctcgtttcgatacaattcaggccttttcttcttcatatttacatttcctccattcttttttgttcgtgatatggtataatttgcttgttaaatagcaaatgccgtacagtgcttcgtgacagaaacagagaatttacttttcgctcagaatttccgtaacgatgctctgtccataagggacagtaccccttttcactgtttaatgcggctttttgtgaaataacgaaagccttcattctatgccataccctgtacgctgttgagtgcatcactcgttggtatagatggcaccacaaaaagagtggtttttcgctgatttcacatggtttgaatttaacccatgatttttgagtgccgttctgcccgaatgtcgttcctgcccggatatcttcccggcgttttctccccgttggtacgctcgtgcttttcgcagtcatggcgatacttcgctgggggacatatcccattcggacggtcattcagttttcaaggtgcatcggtgatttacgagtacagtttagcgaaaaaagatgctctctcccgtatatccaaaaggtaggaaaagagcataaaaatgcgtggatttccacgcttatggaaatggagatgaaatatgcaaccgaaactcactgttcaggaaagattgaaagatttgcgtgtcgtagattttgatttgacgctggaagaattagcagaacgcactggcctgtcccgttccgccctgggaaaatatgaatctgatgaaaacgcaaaggacatcagcccctttgcgattctgacactcgccaagttctatggcgtgtccacggactatctgctgggtctgacagaaaataaaaatcacccaaacacagagctgaatgctctacatttgagtgatgacgcaattactgtattaaccaccgggaattttaatcaccggctgctttctgaaatgatctgccataaggattttcagcgcatgatgctggatgcagaaatctatgttgatcgtattgcggatatgcggatcaccaacatgaacgctgccatggaagctgtccggcaatctgtgattaagaaaaaaggaaacaatgaggaggacttgtatctgcgcactttggaactggcacaggtgcaggaagatgagtatttcggtcatgtagtttccaaagatttgacaagcatcctccatgatattcgagatacgcaccgtaaggacgcaaccactgcggacgagaattgcgttgctctggaagtgcagaaacaattacaggatgctatggactacaaaggcagcaccgaagaaaagaaagcccgtctgttcctcgccaaccttggcattgactacgatgcacttactatggagcagtttgcaaatctgattgaagtgttgaaactgtccaagcacatgaacagcccgatcagccagcgtggtaaaggcagtatgacccatggtaaggggaaaagaaaaaggaagtaactcgggtataaaagtagaagggactggtgcaaatccaaattttgcaacagtcccttttttgataattataagattgtgttaaatatgctgctcataaatacctgtgcatgataaccgccactttcaccgacaccttcaaccaatttgtagttcttttttagtatgtcgaatagatttgtcatttcaaagcatgaatgtttagggaagttcattagattaaagataaacttatcatcggacagttcgtaaacaacaccttcgtcaaatgttatttttccggttctaatatccttcattcccagcagatcagaactaaagtctcgttttacaaaataaatattccagttaccattgtataccgtagagtcgtcatctctaataaaatctataaaatcgaatgcttcacctgcagcctcaggaattgagagaaatttagcgtaaatcgccttaatgatctgatacttggtatgttgttgaaaaccatttatcgatttgggagttccatcaagattaaaaaaccttaagtatgcttcatcatactttcctaagaatgtattgcatttacggcataaagttctggcggttctccctttgggaaatagagatgttgataactgagtgtcaaaaatatctccagtaatattctcaagagtttccccgtgattcaacttttctctaatctcagcatgtacactctccgaagtaaatgtatcaaacattttgccgagatcaacagcaacaacatcttcatttcctgtgtttcgtgcagggtagtgttcctcactcatatcactgtcagaataataattgccgcataatctgcacctgtgttgtttttcgtcaaaaactaccatgagatacaatccttttctcttcatctgtaaaccttgagcaatgtgccgataggctgcatttagctttttctctcagaacggcaaatcctcatttccggtttccggttcaaaaattctaggttgttgattcggggactcagaaagaacggcaatcaaatctacaatccgctgataaagctcatcgaaggttagtatcaacacattgctcagactattacggaaattttcaaaagccgcaacttgccctggggttagcgaagccattttcccgataattacaacgcattttggggacaggacttcaaaaggctccgaactctgatgacacagagaataatactcttttgtaagcttgtctctgtaatttagaacttggtttatggctccgctcaattcatagctaaagctgtatgtacctcgatactggtttccgataagttcagtacatggtgttttaatctcaatcaacgccacattttgagacagactgttctgataaatgaagtcgcatagattaccaccgctgttgttaattcctttgccgccaacatacgctttatctgcaaatatcgtacaaggacaggcaaagatttgagccaatacccactgatgttctttgaaaacagtagtctgccaaaactcctcactatcattttcgagattgtcttccatgagctttgcaactctttggagtttttcgatattcaaagacgttgtcaggtgttgcagattttcatcttgcaactctgtcagactccgtttcaacgattccaaagaacttgtctgagtgatgagacgaagcagtgtttttacaagatcatagttttcttcattgccaatcatccgagccgcagaagggtcattctggatgattgaaaggaattggcgaaaactgctgtctactctggtgtaagtagctgaaccatacgggatttcgcccatgtcttcatacagcgcatacagccgcttcaaaccttggtaaagctcatatgtttcacttgtgctcagattgagttccatccaatctccgactttgacagagccacgagaaatcttcaccactgacccgttgtcatcgctcggaaaggcggcatcgtttttccgtttcttttcatatagaaattttccagaaacagatttatgggggtctttctcgttatctaccagcgttggacagaacttgaaccggatcatttccgtctggctcaagactaccggtgacgcatccgctgtgacagcagaggtggatataacatcaactgtatcagttgtcatatcatgaactttcggtatatgtaggccgatttgcaaatcaattccacccttcacagcttgataatagtatttgtcatcctcttcctaaccggcgtgtctgcatctttttccagatagcacggcatttacggcatatctcaggatcgatccccaatgtatctacaagtagttctttgtcaacaacatccagcgcaagttcaatgtcttcatcattgcgcactatagcgtcaatatgtgcaagcagcttgtcccttagtgcaggatcaatcctttccactttgggaagtaaaatgttgcccatctcaccaggtaagatttcaagaacacctccaccatagcttcgtccgcaaatctcggtgaacgcaaaagagatgctgttatagtaggcaagaaggacattctctggatcaacgccatcgttaaacttcatgcggtgcatagtgtctgttgacactgcatcacatttattcagtacaaatttaggatagaaattatttcttcttaagaaaaacgcatccggaacccatacagaaggaacaatgtaccatctttcccggatggagcatttgtagccctcgtgttcgccattcgcttcgccgagtgaaatgtactctttgtgcttggcgggatattcatcgtatggaatctcagggaagctgattagacgggcacgctttccagcaattttgtttttctcccaatcttgtgctgtgaaatatattccatgtgcatgagaactcctgccaatcaaaggaagggttacttcacttaactgatattgctcagatgtttcttccgtaatggagaagtagccattattgcctgttgtaattccaacattgataattccatattcggaaaattgggcaaagcgtttgtctgcacgaagttcctgaataagagacatttcctctgcgtttacgaaatattttgtccatttttccttgacgtgctgcaacttttgaaatccattttgagatagatccaactgagcaaaaccgctaagattattcatttcaatgatgcgaatacccttttcttcttcgcctttctcgccaataaacacaacgacttcttgctcgatatcagggaacacaagctgttcaaatgtgatcagagtaattttcgcaagattattggccaaatataggcgcagatcctccgcatacgcaacttgaagtatctcagctggaataacaaacgctatcttacctttttcggacaatagctgtacacaagctacgataaacgcaacccatgcatttatcaatttattcgctttcataccatgcgaagtcaaaatttgagactgcatttctcgctggctttctttcagatattgatagcgaatataagggggattgcccaaaatcaaatcgtactgttccttgccgagaacacgattatagaagtcgaaaaagtcttcggtgcatacttcgatttgttcaaattcagaatacctatcacgaactttatcggcttcgtcaggttcgatttcaacagctgttagtttatccaccttattcagaagattaaggttctgtagcgcatcaagaaatactccatcaccgcaacttggttccaagacggtagagatattttgagacgcaaaaagctccaccatagcatccgcaagctgcaatggcgtataatacgctcctcttagtttctgctctgaactatcctttttgagtctcatcgttaatacctcgcttaataatcgagtctatacacccgatcaatcaatccctgaatctcagagataagtgtttctttctgtctctgcaacagatttgcaatgcgctttgcgggacgtccagacagtgcatcattgatttcgtaaatctctcgacttgctgctaccactctgtcgtgaatggctttctgttcttctacggcaaaatccaactcaacaaagggtagtgtagagagaacgaatgtaccacgagcagtaaatccgccttcaaaatcgctgcctacgatctccaagattcgctctgtaatggggtttgacagccatgcctgaatgtattcaagtgcgtatggactaccatcttttttgctaactgcacaatatccagcagtaccacctgacgcaatcagaatatcattcgtatccatcgcatacatgggttctttgctcaacacgccaactatcaatttgggcgtgttaataaaggcggtcaaggcttgtgttctgccatactggtaccatgtatctgcggtggcgtttggaacgttacgagttccatcacgggaaacacacttaggaaccagacgatcataatgcgctaagagataagcgtatgttcccggataacagctttgcatctcatctatgcggataagatgtccgttgttatcgtaggggaaaataatctgcttgtcagtcgcaagaatactatacgaattcaggcccttctcagcctttttggttggcttaaaataagggcgaagcaaggccttctcaatagtataattattgccatccctgctgatttcaacagtatcggcatattcggccacaatttcatctgaggagaaccaatatataggcgttggcctttctgcacttgtctgaataccgttaaatatctctgcgtgttttgtaatggggacagatacttcatccaacctctggagcattgtcaaaaactcaaagtcagttgtcaatctccatggcagcttgttcaatacggaagaattaagctcaatggaactcacttcttctcctgcccacagtttgttagcagaatcaacgctgctgtaaacaaaacttgtctgcttcgccttggaaagtaaaatgatcgagctgtaaatggttttatcctcaaacagctgtgcatctccaaagtcatccagactgacgagcatccgttcttttgcaatcaggttgcgcaacttctcgccagcgccaattttgaagaatttattaggtacaatatagcataccaagccattttcgttgatcttattgatagcctgctctataaaaataaagtatttgtcgaattgcttgtgcgatgtcttatatttctttttatagacttctacttcggcactcggcaatagggcgtgcatcccctcggtattcacatacggaggattgccgataattacatcaaatccacatccattgttaattgtgctccagtcaaagggagcaatctccatcatctgacggttggcaccgctaatgccattcaattcagtttggctgacaagggagtttccaaattgaatgttgtcacccagatcaggaagaatcggaacaacttctgatacagaaggtgcggtttcatcttcaatcaacttgattaacaaagagaatttagcaacttcgaccgcatggatgtcaatatctatgccgtaaatgcaggagcaaagaatgtcttttttctcttgaaggggcagcttatacaagtcaatacccgtttcaatcaaatgatctgtttgcccattgcagatataccattgcacacagtaatcctgcaaataggcaaatgcctcttccaagaaaatgccagagccacaggcaatatcagccacactgatattcaaaatctcagagggagtctttccttcacacactttggaaagcgttttatcgaccatgtacttaacgatttctgttggtgttgtaacaacagatctgttctggcaatctttcttcttgccaagaccaatggtattattttcgagcagaactaactgttcggttaagaatatctcgtaaatctttccaagcaaattaggctcgataatattaaacaaataagggctttgagggtaatacaaatcctcaatcatgcctttaataacttcgcaggaaagatcaaaaataatgtcttcgccggaaaacattccagaattgtagcgccggtcagccgaacggaacaattcctccagtttgggttgcagttgatcggcatctgtaatggtatccttcaacttgtgatacagtggcagattcttatcttcgcaaattctcaggaagacaatttggttaataaactcctgcacaacatcgtttaacacttccaacgacgcatagcggccaccctgagcatacagttcgttgctaagagccacacgccattcgttgatttgagaaagaaatagtgtatcaacctgctgggtttgccctccggttgcggggaagtttgcatccaaataagcatcaaaatcaccagagtaaacggtgtctctcgcaatcaaccctacaatctcatcaatcttttctacatactcagtataatggtacagccggtatcttgctacagcacatccatcatcttcgtgagcaatatggcaggtatcgtagattgccagatattcaaaatttgtgagaacagccagacgatgctttgcgttccagccgtactttctggtctgaatagctggatctgcatctctggtaatatctaccgcaggcttctttgcttctacaaagaatttaggcacacctctgagcgtaatggtatagtcagggcggtcagttcgagtggagtaattctccgcaataacttctcgatattggggtgccaatcctttttcgtttgcaacatcccaacccaagagctttaacagaggatcaatatattcaattctgcaagaatgctcattgtaagcatttcttgcgtccttatagaagtcgatgttagcatgaaaacgatctacaaggttctgcaattcagtcaggttagtcattgctgtacgctgcctttcttttatcgtttgtcggcttttctgcattttctggaatgatccaaattctactcatgcgagtagcaccgtcaatacgattcgacttgcatagaatttgaacttgtctgggagtgattccccactttacagcagcttcctggactgtaatatatccattcataacaaacacctcgcaaatcacaatacaaaaaaccactataattatattcgcttaaacgaaataaatcaagtggttccacaaaaataacacgccgtccataggggattcccataggcggcgtgttgctcaactatctaaatattcgattattcttccatgacctcaaccatcatcctggcacccagcttgaagctgttctggaagatcaggcagtcggttatggtctggaactcatggacgcagtccgtgtatttctcaaacaactctttctgcccatccgtcatggtggctttgagtttttcttcattcctacagatcaattcctgtagcttcttgtactccttggaagaagtatcgtactctgtcggctcgatgtttccataccaaaattcttccaatagcctcatgcctcatcctccccatagatcagtccctggaggatgatttcctctgcccggttgcggatgctgttcatggcaccaacccatgccatttggttatctgctttcagttcctccgtcacgccctcagatgccttcatctgctcgataatcagggacaaacgctcctgcgcctgctcgttcagatcagccagatatgtccagagttgaccgctgagaacaagatcattaaagaggattgggcaatgctctttgaggtagtcccggtgcatccgtccccatttaccaatggggcgctgctcctcagaggacagggtaagaaccggaatataataatcgccaatgtgttcataccaaaggccattactttcatcataaatgtgtttcttcatctcagtcatggtattgatttccttattctggtgttagaatcgcaagtctgactctccagaaatattggtaaatctttggtaaatttgagattgaaacacaaaaaacgcttaaaaacggggctaatgagacgatatgagacttttcatcatgcccggcaaatcctgccgtggcagataaataagatttttgtcatttttgttcccctatcttcattttgactgtaccgctattttaccatattcccgcttcaatttccagtgtaaacagaagcctccgagtgcgcccatatctccgaaacctacgccatcattatgcggttgatttcggagtggtctttccccacaaaaaagcagctgctccttgttaaaaagagcagctgcttttctatgggatttgagtgaaaacttgtaagcaaattaagaatcaagaatattatggataccctgctgaacggtttcatagtctttttttaaagacgccaaccgttcgcgcccggcattttcgatatgataaatcacacgcatgcgggaacgccccgtgctcatgcgcgttacgacctcctcgccggtgatgtacccatcatccgccaagcggtacagaagcggataaaaagatccctcctgcactgtaattaaacctttgcttcgctccttgattttctgcacaagctgataaccatatgcgtcttcttcacacagcaaaaacagcgtgagcatttctatggagccttttttcatggtatcaatagccatagtggagataccccctatcaagtagtagtctacagcaaattaaattacaagtcaatacctatttttaataaaatgtattaacaagcaaattttcatatgccatgatagcagcacgcagaacatgcgcaatttatactgttttaaagatttatatatcggcattattgtcttagttgtcaagcggcgcggcttcttcgggcacgtcttctgcttcggcttcaacgggcagcaccgcaagcaaatcgagcagaccggtacgatcatattaaccgaaatgttcctaaagaaaaaatgccccgcaaagcacttagcaaaatgagcaaagcgcagatacgccattttcgtgcgcctgcgctcttattttcgtatttactttctgaaaagcttatccagcgtcttgccatccttacttttccattccacccaaccgttcgcacttgtaccgaggacgaacatagcggccgagctcggcgacgaaaacgacatcgatttgttcagcacatattcgctgtttacatcggtcacgtctccgtttttcagagctgatcgtctctggcgcgcaatggtcggtgaaaggcttttatattccgtgcgcccgatacgcgagccctccagcacctcgaaccgctcgccgtcatacacgccaaacgcttctatgccgttacgtgttgtatgtaaaaccgtttcttcgctctgcatcgcttttgcatcgttcattttatagcccagcgtcgccatgatgaactgaatttcatcgtagacttcctccacagtggcaaggtcatattcgtcgatctcatatttcggcacaacactgttttccaccgtgtagcgcttggattcctgcgctttgatgatcgcgtatttttcaagcccgctgatcatatccagcgtaaaggtcttgctctccgccaaaaacatgatggctttgttccaaaaatctttcgagcgattgtggtcgtccagccgcaaaatgccgttgcgcgtctgaccgatgtaaatttgcgcgatcctattgtcttcgctctcatttattaaataataaatgccgtgccggttgatgcccgtaatgttcttcgcttcggaaagcagtgggcgcggtatcacatacgtcgtcatggtagataaactgcggcggatggagcgaataccgtccggctgtccgttgtgataaatcgtttcaagctttttgctgatgcccatagtgttttcctctgctcacccatcaaattcaagtttatatatgtattataccacataacatactttcgcgccagtgccaaacgcatattatatgaaacttctgtaaatttcgtcccaaataaattgccgcacgtttttaacgccacaccagccgctgtccgacgagcgcgtatacatcgagattcctgatgtcggcatgaaatctatgatgccaaaaccatgaccgtcctcgcctctgtgccggacggcctcatagagagcctcaacgcacagctcattaaaatcaaaaataaaccgcaccctaaaagaaaaaagctctgccgcgcaccgatttgatgccgacaaagcctttttctcgttttagggtgttaaatgaatctgaaatacatgcctgcactgccataattgcagtagtgctcgtccgtcgacatgacatcagccttgctgatctctcccgtgatcagtttttcgcacagcactaccatatcctgcacaatctcgagccgcagcgggttatagtagaccgacctgcccgcaaggtaatcctgctggtgctgctcgtcgcagccgttttcctgaatggaatgcccgccgaaccacgcataatcgcgcagcgcctccgcacgcggcaggaagcactcaaggttctttttgtagctctccaagaccttatacatgtctttttccgggcagatcatcaaaacgatatacccggagccgatggcgtcgccggtaaaaagcgccttgtagtgtgcgcacgcgaacaccacggagttttccgtgtgcccgccgagattcagcacatccaccgtcacaccgccgccgaggtcgatcacgctaccctcgtcaataggtacaagctgcgggtatttgccgccgtcggaaagcgccgccgcaaagcagttttcgtcttcgcggatcttctccacatcgtttttgtgcagatatactttttcaaatcggtcgatgcggaacatgtggtcgcggtgcgggtgcgtaatcgcaacctcgaccggcagccgcgtcagcttcttcacggtatcgagcaggtcgccctcgcccatgcccgtgtcgatcaaaagcgccttgtccctgccctcaatgaggtagcacgtcgccgtaaagtagtcatctatccgccaaaaaccgggctttatccacgtcacttcaagctgcgtgcgtctatcctgctttaacagccaacgaacaatttccccgtccgcaaagacattttcccatgcgttttcagggttgatctccgtgcgctccaccgtttcggagcctgttacgcgcaggctcatcacaagcttttccgcatctgcaagcaccttgccgtctgcgagcacattgccctcacccgcgaacgtatacaccttcagcggcatgaattttgccgcgcgtacttcataggggtctgcgtgcccgccgagaatcgccgccgcgctgaagcaatgcgacaaatgcgaaatcagctgccacgccgcgtccgcgcagctttgcgatgccgtgagcgacaatttacatttgtcgatgatgcccgtcgtctgccattcaaaaaccaagctctgcaccgctgtttcgggcaatataccgcccggtaaaatcaacgcagttacctgtgcttctccgcaatgcggctcgagtttacttaaacagctttccgcctccgtctcattcgagacaagacacagcagcgtcggcttcccgccgcccagctccgcgccgttcacgcaccatttgagcacctgtccgtcaaacactttttcaaaataatgcataccttttcctccccgttacaatgacccgctattttgtgaataaaacaaaaagactccacatttctgcaaagtctttcatggtcgaggtgagaggatttgaacctccggcttctacgtcccgaacgtagcgctctaccaagctgagccacacctcgatataagccttgaatactcaaggccattttggcagcggtaccaggatttgaacccagacaaacagagtcagagtctgctgtgctaccattacacaataccgctatctgtttcgctgtctttctttcgtttcgtttgtttccgtcggacaacgtagtctattatagcagatattcgggaaaagtcaacccttttttcaaaaaaactttaaaaatttgaaatttatttttcgagtgagaattaaaacgcgtaaaaaagcgcggaattatgcggtttttcgccttttcagccgtttacgggctctgccaaaaaacacgcgccgaaagccttcggcatacgctttgcggcattttccgctaagcttttttcagaaaaaattccaaaaaccgcggagccgctgccggtcatcaacgcatttaacgccccgttttcgcacagatatttttttatctcctgcacaacggagatttgcagcgcgtcgtcaaaccgatttccgagcgcgtttgcaatttcctcaatcgagcgatgctctaccgcgcgcaccatacccggcgtgtagcgcatgccgccgtccggcacgttatcgcacgcacggtacgcttccggcgtgctcacgcccacgtccggcttcacaacgacaaggtaacacttcggtatctctgccagcggcagcaactgctcaccaatgccaaggcaacgatatgtgccgtttaaaatgcagaacggcacatctgcaccgatgcgcaaaccgagatacaaaagctctgccgtattgagcggctcctctcccgcttctgcgcacagatgattcaataatttcagcacggccgctgcatccgcactgccgccgcccatgcccgcctgatccgggatatgcttttcaatataaatatctgcgccgaacggcacgccggtagcgtcaaaataatactgcgcagccttatatgccgtgttgcgcccgtcgcacgggatgtgcggcttcgagcacttgagtataacctcccccgtatcgttcagcgtcacgcgcacacggtcgcagagagacacggactgcatcaccatgtcgaccgtgtggtagccgtcttcgcgccgcccggtaatatcgagcgataagttgacttttgcatacgcattgcattcggctgtgttcatattcagtcctccctcataggtcaaacagtgaaaaccgcttgatattgatgacatgcttcgggcacatttcgtggcagcagaagcaatggatgcacttgctgtactcgatgtgcgccttgtgctcccgcaccgttatagtgtgctgcgggcagctttccgcgcacttgccgcagcccacgcactgtgccgtgttgatcttcgggtacggcgttaaaactctctttgcaagtggctgcatgaacttcggaacgcgtgtcgtaaaatcgatgctgctggagcgcgcacgcttaaaatcgtgcacgacaatattctcaaaatcatcaccaagcacttcgatttccgaaagctttcccgcacaaagtccgcgctcctgtgcgtttttgagcaccaaaatttcttcgggcttcatatcgatgagcttcgcgccgaccatatccgcttcgtagggactttcagatcccacaagtgcgccgacaaagcgtttttggccgcccgtaggtccatcgccctccatggcgtctatcgcatctataatcgagaaatccgggtgcacatattcacacaaatcgacgagcatttccgcaaacggctctttttccgggtaacggctgtgcagctccggctttaatagccccggcaccacaccgaagagattcttcaccgcgccggaatagcccatcatgccatgggtctttaacttcgcaatgtcgatgacgagcgtctcgcgcggctgcacgaacggctctgtgacggtcagcgtattgcagcgctttccctccggcagctgcactgccgtgctcttacacgctgtatataacgaaaagccgtatttttccgccgcttccgtatagccgcacgcgcggaacgtgcctttcatgatagatgtattgtacggcccgccgccgctttccgccaccagcacgtccgcgccccgccgcagcaggcaaatcgcggccgcagccgtcacattcgggtgcgtaatgatggcctcctccggcgcagagcgcatgacgagattcggcttcaaaataacggtcatatgcggttttatgcggacataaaacgccgaagcggtgaacattgcatccaccgcttcggtcagccgttctatgtcataatccgcaagccgctttacatacgcactcacttcaactccttcaaaaatgcgccgatgcggttcagcgcctctgcaaggtgcttgatggaatacgcatacgaaatgcgtacaaagccctcgccgcacgcaccgaatgccgagcccggcaccaccgcgacatgcttgtcgtaaatgagacgctcacaaaattcatcggacgtcatgccggtggactgaatggacgggaacacgtaaaacgcgccctccggctcaaagcaggtaaggccgagacggttgagcccatccacaatcaaacggcggcgcatgtcgtactggtcgcgcatttcggcaatgtcgtcatcaccgtttttcagcgcttcgatcgccgcgtactgtgacatcgtcggggcactcataataccgtactgatgcagcttcgtcatcggggagataatctccttcgggcccgccgcgtagcccatgcgccaacccgtcatcgcatatgtcttcgagaagccgttgatgacgatggtgcgctccttcatgcccggcagcgacgcaatggagacgtgcggctcgccgccgtaagtcagctcactgtaaatctcatcggaaagcacgatgaggtcatggcgaatgatcacttcactcagcgctttcaaatgctcgcggcgcatcacggcacccgtggggttattcggatacgggaaaataagcaccttcgtcttgtccgtaatggcgttttcaagttcttcgggcgtcaagcggaattcgttttccgctttcgttgcgatggaaaccggcacgccgcccgccatacgggtcagcgggtcgtagcacacaaagcacggctccgggataataacctcgtcgccctcgcccacaaggcagcgcagcgccatatcaatagcctcgctgccgccaacggtgacaagaatatcggtagctgcggtgtattccagatcatatttgcgctttaaaaagcggcagatctcctcgcgcagcgccatcaggccgcggttcggggtgtagcgcgttctgcccttttccagcgtcgtgataccctcctcgcggatatgccacggggtgaaaaaatccggctcgccgatggaaagggagatcacgtcctccatttcgtttgcaatgtcaaaaaagcggcggataccggagggcttaatcacgcgcgcacggtcgttcaggtgtttgctgtaatcaatcacaaaggttgcttcctctctcgtcaatctcatcgtagtcggtgacaaagtccacaccgccgtccttatatttcgtcagaataaagtgcgtggcagtggagagcacaccgtcgatcggcgcgaggcgctttgcaacgaacatcgcgatctcagacatggtattcgccgtaacggttacggcaaggtcaaatccgccggacatcaggcagacgctttccacctcggggaaggcctttacgcgtgcggcaagctcatcaaagccggagtccttcttcggcgtaacgcgcagctcaatgagtgcacttgcgcggtgcacatctgtacgctcccagttgatgagcgtgcggtagcccttgatgacgccgtctttttcaaacttatgaatggcggccgccacttcggcttcggtcatatccagcataacggcaagctcctgcacggtcagcttggcatcatcctgcaagagctttaaaagcttttccattttcttatccatggtgttttatcccttctgattttattttgcaggcctgctgtaccttttgcagcaggcagtgtaatctgttttattcgattggcacctgcaccggcttgcgctctacaaacacggtgtactccttgtagccgatgtcgctcaaaagctccatggcttcctctacgccgcttgcaatgttctccgtgcggtgtgcatccgcgccgatggtgacaagcttaccgccaagttccttatagcgcgaatagacttcgcgatcgggcagcttcggcgcatccgtgcgcaaaatacgggaggtgttgaactccagcgcgatgtccgacttgatgagcgcttttaaaaccgcgtccagctcgtcctgatacggcttgtagctgggcgtttcccccgccttacacatgtagcgcaacgggtaggtgatgtgcgccagtgtatcgaacttgccccactccaccatttcaaggctctccgcaaagtaggcgcgcaaagcgttgtcgatctcctgctcggtgggattatgctcgccgatgtggtaaaaatcgtcgtgatcgcgaatgttgtgcagcgaaccgattaccacgtcgtagtcgcgccccgtaagcgcatcgtgtgctgcgtttaggtcctgcagaggctggccgagctcaatgccgcgcaaaagcttcaaattcgggaaacgttcctgattttgcaacagctccgcataggactgacgtacgacatcgtaataccgtccgccgggaatgtgcggcacgttcatgtactggttgcactcgcagtggtcggtcacggcgtagtaaaccagacccatctcgatggcgttcatgcacatatcgcgcatgttgcgggtgccatcgaacgagcagttggaatggctgtgacaatcggatatatttttgtaacgcaaaagatcatccccttaaagcacttcgacctgtatgctcaaaacaatatacaaattgattttaacacaataaaaatcattttggaatacccaaagcataagttttgcaacttttcgcctaaaaccgcattgtaaagcgatgtgaaagtttcttccgatttccccacaccgtatctttttgatttttacaccgctatttcccgcaaaacaccttttaaaccttgacagcgccccacatttgatagataataaagaaatagaaaaccacagcaaagcgcttttatgttttgcaggaaagggtagggtcattttatgaaagcagtcatcaccgtaatcggaaaagatatggtcggcattctcgcgaaagtctccaccgtatgcgcagaaaaaggcatcaatgtcattgaagtcacacagtccatcttgcaggatatgttcgccatgatcatgatcgtagacatcagtgctgcgaccgtgccgatcagcgagctctccgatgaattcgatacgcttggcgaaaagctcggcctgaagatccatgttatgcacgaggacgttttcaactccatgcacagaatctaaatctattaccgaaaggccgggaatgaaactatgatcgatacacatgatattctggaaaccataaatatgatcgataacgagaacctcgatgtgcgcaccatcacgatgggcatttcgcttctcgactgcatcgattccgatattgataaggcctgcacgaaggtctacgacaaaatttgcagctatgccgaaaacctcgtcaagaccggcgaggacatcagccgcgaatacggcattccgattgtgaataagcgcatcgccgtcacgcccatcgccatgctggcgggcgcaaaccccggtgcaaaccccgttcgctttgcaaaggcactggaccgcgccgcaaagaccgtcggcgtcaacttcatcggcggctattccgcgctcgtgcataagggctttgcccccggcgattatgctttaattgaaagcatcccggaagcacttgcggaaacggaattcgtttgctcctccgtcaatatcggctctacaaaggccggcatcaacatggatgccgtaaagaaaatgggtcacatcgtcaaggaagccgccgtccgcaccgcggaccgcgactgcatcggtgcggcaaagctcgtcgtgttctgcaacgcaccggaggacaaccccttcatggcgggcgctttccacggcgccggcgagccggactgcgtcatcaacgtgggcgtttccggcccgggcgttgtgcgcgcagccatcaagaaggcaaaagataccgataacatcactgagatcgcggacatcatcaagaagaccgcattcaaaatcacgcgcatgggtcagctcgtcgcgcaggaggcttcccgccgtctgtgcgtgccgttcggtattgtcgacctctccctcgcccccacaccggccatcggcgacagtgtagcggatatccttgagggcatgggccttgcgcagtgcggcgcacacggtaccacagctgcactggctctgctcaacgacgctgtgaaaaagggcggcgtcatggcgtcctcacacgttggcggcctttccggcgcgttcatcccggtcagtgaagacgccggcatgatcgctgcagcaaagagcggcgcgctttccatcacaaagcttgaagccatgacggcggtctgctccgtcggcctcgatatgatctgcgttccgggcgacatcaccccggagattatttccggcatcatcgcggacgaagctgccatcggcatggtcaactccaagacgaccgccgtgcgcctcattccggccatcggcaagaaggtcggcgaagaactgaacttcggcggcctgctcggctgcggccctgttatggaagtcaatacgaattccccggccgtgttcgtcaaccgcggcggccgtatccccgccccgctgcagagccttaaaaactaaaaaacataaaattcagtttttcgttcatactatcctcggtgagcaaagcgttttgcctttgttctccgaggattttttatcgcctgcgttcgactttcgccatcggtcgggtgcaggcaaatgcaaaaaggagcagagtatatgctggacgtcatcgctttgattttgacggtgatcggcggcatcaactggggcctcatcggcattttccagtttgatctcgtcgcatggcttttcggcggacagggcgccgttttgagccgcatcatctacacactcgtcggcatcgccgccgtatggtgcatttccctcctgttcagggacaataacctcattgaaaagtaaatgcaccgcaaaaagccgagacacttcgttttgaagcgcctcggcttttgttgttatatacgtcggttaaaagttttgtctgaaatacgcacatgcgccgagcaggccggcgttgttgccgagtgcagcggcctccacctcaaggtcttttgcgaactgctccatcgcgccgttcaaaatcttctcgcgaagcgggcggataaaatgttcgtcttcccttgaaataccgccgccgatgagcaccatttccgggttgaaaatgtgcacaagaccgatgattccaaatgcgatgctgtcgatccagctgttcaccgtcgcgctgacgtctgcgtcatcgaggtggtcaaagatcaccttgccgttgacgtcttctgccggtacgcccagcttttcgagcaatgcaacattctccgtaaaacggcgcacaagcgcgcccgtagaaccgtagcgctcaaagcagccgcggttgccgcacgggcactccacaccgtcaaaattgatgatataatgcccgatttcgccaccgatgccgcgtctgccctgaatgaggcgaccgttttcgatgatgccgccgccaatgccggtgccgaccgtaacgacaagcacgttctccttgccctttgcgcgaccaaacgtctgctcgccgagcgccgctgcgttcgcgtcgttgatgacggttacaggcagatgaaaccggtcttccagaattttcttcaccgggctgccgagccagtcgccgagctgtgcacccacgccgataaccgtgccggagttcacatcaatctgccccgttgccgaaacgccgatgccctcgattttcacggggctcttttcgagaacttctcccgcaaggttcgcaaccgtcgtcatgatggacgttttgtaaccgtcaaagctgacgctgcgcgtttcggaaagcagaactttgccgttttcgtccacaacgccgatcttcacagccgtgccgccgatatcaatgcctaaaagcgtactcatgaaatggcctcaacaaatctgcgggtgatgtcacgcgggcgcgtaatggccgtgccgatgaccgctgcgtgcaccgggtaagagaacaccttctgcagctggccgcgctcccaaacaccgccctccgcgatgaccggcacgttcagctccgtcgtgatgcgggaaagcagatcgtagttcggaatagccgtgcccttcgtctttgccgtgtagccgcacagcgtcgtgccgacaaggtcaaagccgatctccgccgcgtgcttgcagtcttcatagcaagagcagtccgccatgaagagctgattcgggtattttgcgcgcgcttccttgaacagcgtgtcaagatcaaggccgttcggacgcggacggtctgttgcgtccagcgcgataatctccacgccggttgccgccagtgcatcgatttccttcatcgtcggcgtgatatatacatcactgtcgtcgtatacgctcttgatgatgccgatgaccggcaggtcaacttcctttttgatgtccacaatatcctcgcaggtgttggcacgaatgcccacagcaccgccctcttttgcggcaaatgcaaggtggcccataaagtggtagccgtaaagcggctcatccggcagcgcttggcaagagacaattacgccgcggtggatctggtttaaaatttcctgatttgtcataaaaacgcatcctttcgtttttgaaaacatcctgtatctctatcttagtacgctttgtacgttgccttgagcccaatttcaaacatacggctccacggcaggaaaatatcttccacggttactttgtccgcaacggacgtcatttccgtctttacgaacttgcgcagctcctccaaaacggcgttggccgccttgccgcgctgctcttcgcaccagaagtacgtcatgccccactgcggcagaatgtgctccgtcacgtagctgcgcacgaccgcaccgtagccgaaatcctcgataaaacgctccacaaggaagttctgcttcgcttcggtattattctggtacatattgttcacaatcatcgcgagcaccgtgcccatggagtttgcagaggtgttccagcctgcataacctgcaagcttcatcaaaataccttgcttattgagcacgcgcagaagctgcaattcgccgccgttcgtgtaggcattgtcgaggatcgccgtcggaatgccgcgcttcaagcaatcgttcacaaagtacagaaactctgccatattgcgctccacatcatagttgatgttgttcgccggctgatttgcggcttcttccatctcgtttgccggagcggtgatgcccatcacaacgtcggcgtcggcgagcgacggcacagcgatgcagcccgccgccatgacgtggtactttacggtctcattgagacttctgtcctcgtagttcgggatcagctgcggcgccagcgtggacgcatacttgaggtatacgcgtggggtgttattctcaagcgcgttgatggcgcgggagacaagcaccatgccgagctcatcggcgcccgggtacaaaatcacacggtcattgagcaccttctcatcgatcttcgcgcgcacggtcttctggtccattgcggtgtagccgtactttgcggaatcgtcctgcgggatgatgagaaaatcaatcgtgccgtcctccacaaggtcgagcgtgcggatattgaagttgccgttaaatgtacggcggtcaagataatctttaagcgccgcggggtctaccttggctttcaactcagaaagctcgttcgcgtcacccatgccgagcttttcaaggtgcgtcagacggccgatatggtgaatctctttgccgtaaagctcatagtaatccggctcctcatcgtcggaggaatatttcgggcagcgcatgatgcactggaacgcgtacagctttacctgcgggttcttttcgcgcagttcttttaaaagcatcagacgttccaaaaccgtctcctcggaaagatggtgcaagcgcgagggaatcaggccgccatacagcagcgtatcgatggaaatgaccgccgcgtctaccttttcgatatttgcgatcaggaaatcgcggatgaattcataagacgccggggtcttcttctggccgagatgttccgggcgaatgatcgtatacttttcgccgttgaaaattttggacgggaaatcaaagttgcaggggcgctcgtcgagcggcagcaaaataatgtttttcatggtagcctccttttacgcgcggatgatcttccacgcacgtgtgttgatgttctccagcttcacgtccgcaccgccgccgatgtacaggccacagtcctccggcacttcaaaatcgaccctgccgggtgcgaagtcaaacacattgcccttgagcggcaggttcttagacggcttacgggtgaagtcaatgtttctgagctcatattttctgcaccgatatattcggtgtaacagacatcttaaatcaatttcaagtttaaaagtaagaataatgaagcaagggcgcaggaccttttgtgtcctgcgccctgcattcagatcattattcaggtttcagaagagcaattagccttccgtggtgccctttgcgatctcgagtacgtccgggttagcatccagataagcctggaactgggttctgtactcttcgaggtacttgtcgaggccagcagccttcagcttctcgatagcagcatcgatgttgtcctcataggaaaccataccgaccttaatcggatagatggaggagatgatctcggtctggaggttcgtcagctcactggtaacgttagaggaatcaaagatgaaacctgctgccggggaaatgacgtaattgtcagacttgtaggtcatataatcgatgtggtcgtccggaacatcggaagcataagccatgtacggcaggtagcctgtcatccaggtatccatgctgtacagagggttggcgtcgtcacccttgacctgctcaattctgtggtcgccggtcttggtgtagtgcgtgccctcaatgccatagtggaagaggtcatggttctcttcggaagcatacagccagttgaggaacttgaggccggattccggatcctcagaggtggcggaaatcgcgttcaggttctgcacataggtgtagatcatgtccggaacatcgtcgccgaaagcttcaacccacttgacctctgcgccttcaacaccgttctgctgcatcgtaacgccggtagccgggtcgaatgtctgggacggaagcattgcgccgaacttagcgtcgtcgtacttcttctggtggtcgcggttcaggacatccgggtcgatgagaccggcctgatacatctcgtagtaggtgtttgcgtccttcttgaattcttcggactcatagaaggaatcaaccgtgccgtcctgacggatgaggcagatgccgagggagttctcaacatagaacgggtaggtatcatagcttctgtggagccagtgcgccgtatcctgaacctgatgcatccaagaataagccttcataccggtctcattgagaatctcgtcctgagacttcttcatgaggtcgatgatgccttccgtcgtgtccgggaactcgtcgtagccgaccttctcagcgatgtcggagcggtagtccatataggacataacgttgtcgaaggatctccagtagcacggtactgcgtactcttcgcccttgtagagggtgcccagccagtctgtctcggagaacttgttgtagaggtccgggtagttctggatggaatcgtgaatggaggagatagcgcccatacctgcgatagcggaaaggttcttaacgtcctgcataacatgcagcagctcgaactcttcaccggtcgtcagcatgaggttcagtttctcggcataagcgtcccacgggattcttgtaacggaaacctcaatgtttacgccgtcttccttcagtttctcgttgacagcagccataccggtctcatagtccgcgcaaagtgtgcccggctgtacgatacgcatcgggtgaatggtgccgtcgtcctctgttgccgaagattcgtcagatgtggaagcatcggacgaagtagaagcctcagaggaagcagaagatgtgctgccagcactggaagtgctgttgccggagcaacctgcaaaagccgtaacgaccattgcagctgccagagccatagccagcagtttcttcgttgtcttcatttcttacttcaactccttgaaaattgatatatgtgtaaccgtcttccacggtaaacaccgaattaaaatgtgtgcgggcgattaacccttaacggcgccgacaaccatgcccttaacaaagtacttctgcaagaacggatacagaatgatgatcgggcccatggtgataacggaggtcgccattttaaagctttccttcggcgggtttacgttgaccgttgcgccggcagagagcttgctcagtgcggtaatctgagactgaatcttgaagaggagcatctgcaaagagtagtacttctcatcattcacaagcataactgcgttaaagtagttgttccagtagccaatggcatagaacagagcaatcgtagccagaaccggcatgcaaagcgggaagtaaatgccgaatgcaatcttcacttcgcctgcgccatcaatctttgcggattcgttcagctcggccgggataccgcgcacaaagttgcgcacgaggaacatgttaaagggattgaacatcaggctcggtacgataagtgcccagatgttatcatagcagttcagcatcttacacatcatataccacggaacaagacccgcagagaaaaccatggtgatgtagaagtaaagggacagaccgtctctgtaacggcaactacgatttgcaagggtgtagcctgcgccgaatgtgacgaacgatgcaacgacggtaccgaaaaccgttgcgatcgtcgttacaaggtaggactgcggaacggatgaggacggcaggaagagcatcttataagctgcggccgaccattcgctcggccagaaagagtaaccgttgatcgtaatcgatttctcactgctgaaagaaacgatgataacgagaacaaacggcaggacgcatatcagtgcgaacagagcaacgacgagataaatcagaaatgtaccgacattctcccccgtgctgtgtttgattttgttgttggtgttagacggctttgtagtcgccgcaaccgtgctgttcatgagcttgtctcctttccctgtatcagaacagtgcgccatccgggaacttctttctgacgatccagtttgctgtgaagaccagaatgaagccgacgatggactgatagagaccgatagccatggaaaggctcggatcacctgtgttcttaaatgtacggtaaacgtatgtatcaataacttctgcaatcggcatcagcgagctgttgtcgcggatgatcgcatacagcataccgaagtcgccgtagaagatgcggccaacagacatcagggtcatgatgcagatggtcggcgcaagcagcgggatcgtgatgtaaatgatacgcttaaagcgcgtagcgccgtcgatataagctgcttcgtaaaggccttcgtcaatgccggtgatcgctgcgaggtaaacgatcgtgttgtagcccgtgttcttccaaatgttgaggatcagaagaatcgggtaccagtagccgggggtggaataataattgatgcgcgtacccatcagattgttgagcaggcccgtctctgtaccaaggataccctgcagcatgtagctgacgataacccaggaaataaagtacgggaaaagcatcatggactgagaaaccttaagaaacttcttcgccttgacctcattgaggacgattgccaaaacaacggagcaaaccgtaccgacgatgagaaacaggatgttgatgacgagcgtgttgcgcgtaacggtccacgcccaactggacttgaagaagtattcgaagtttttcagaccgacaaacgggctaaaaacacccgtcttgtagttgaacttctcaaatgcaattacgatgtacggcagtgtcaaataagaaaagatgaaagtgtaaacgaccgcgggcagcgcaagcaggtacaaaaacttgtttgtccacagctctttaaaaggattcactctcttcttgctgacatcaaccaaagctgacgccttactcatgtttgcgatcatcctctccgaataatgtgtctcttctatataatataaggaagagttttgttcacctctgcacagccgcacatataaagtaaagcttatttgctttatattatatattgactctgcaaatgcgaacccggaatatcgctattcctgctgaaaacaaagtgccgacaaaacttggtgtttgccaaagcgtgtcgttttgcaatcacagcgcaccgggcgccctccctcatgggtcttcccggaacctctgccccgtgcagagataccgtttctgcaaaccgcttgtttgttttcgatgaacaaactttaacatgctgtgaacgatttgtaaagtattctttttgcgataaactccaaaatttcaaaacaactttgtattttggcagtttcaaggcacttcacaaatttcgcttttctccattttttgagaatcgaatcacttttttcggctttttgtgatatgaaactacggttttttacgatttgaatcaataatctgattttttcgcttgcgtttagtgccgaaatccgttatcatagagttatacgaaatctaaatcgtgtttttcgttctctttttgtatttggagtgttgtattttgtttaaaaaagtaaaaacccggctgttcaaccggtaccttttcagcattttctgcgtggtggccatagccgttatactcgtcacgcttttaattttcaccatctacgcaaatttgcaggtcagctctgcgcgcacctattctgtgcatcagttggagcaggtctgtcagatgacggacatgctctacagccaaatgcgctccgttaataatcaaattttacagaacagcaatacgaaccgttgtctctcctccaataccttcaaccgactcatcgaagccgatgccggcatcaagttacgcgaaatccaaacggcgcagagctatacgcgctatgttagcctttataactctgcctccaaccgtttcgtctccagctctacggcagattttctcacggatgacgatattgcatactattataggagattgcccgataatcccggcgccgatacctgccttctgcgcatgatcggtgcaaactacgccacacagcagctcaagacccgttatgtctattccttcgtcttccgcgtacagctacgcaaaggcggctcgcccgacctcatcatcgtagacgtggacgaagattatttcaacgattccatatcgaacctgcgcacctcgaacggctttcaacagatcctgcttttgaaccgttacggcgaggttttctccaccaatatcgctgaaggtgattcagaaacctttacgcatgcaaaacccgacaatactattgtctccgtggaggatttcccggagctgaccgacaattccggctctttctcttacacctgtgctgaccataccgaagcgctcgtcacctacgccaaggcgtcttcctccggctttacgatcttcaatattgtgccgtactcgaatatttacagcggtctcccccagctcgccatcatcacgttactcgccggcattcttgtgctctgcgtcggcatgttcatctcgttccgcaccagtgcaaagctctccgcaccaatcgaagtgctctacaacaactacgtcaaaaagccgtcgaacgaccatgccggcgatgagctcgaccagctcagcaaggcgttttccgatatgtacatgaaaaccgataagctggagcaaggcctcatctcctcctattccgattccaaaaagcgcaacattcagcgacttatgcacggcgagtatggacagattccgaattacatcgaagtataccaaagctacggcatcgacctcaccgcgccgtattacaccatcgtcattatcagtgcagcctccaaagagttgcgcttcggcccggatgacccaaactatttcatttacagctacgctctcgaaaacctcgccaccgaagttttggggcagttcggcagtgtcgtaccgtaccgcaattcgcacaactttctcgtgatgttgctccccctgcaaaagaacgcctacccggaaaagcttgtgcctgagcttgagcgcgtgtgcgagatcatgcagcgcgagtttgccatgaacaccaccatctgcatcggcaccatcgtggagacagccgtcaatatcaacctctgctatgaggcgacgaacatcgcactggaatattccgccatccgtaatcagggcaaaattttcttcgcctatgagaccggccagaatatcaatctcaactcataccacaacaagctccacatgaagcttgccgaacacatccgcgcaaatgacctcgatgcctgctcgcatgagttcgatctcgcgctttcctacatgtcaaacgtcagctttaatacagccgttgcgtatttcaatcacgtcatgatgtcgctgctcgacgatttctccaccactttcacggatgacgacaccgcttatcctatcttgatggataaactgaataaaattgaccgtcagctaccgaacgtctatatgctgcgtaagcgctgcatggagttcatcaccattttggcgcatcatcaaagcatcaaccgcaaatacggcaacgagcttgccgccgatgccgcaaaggaatacatcgacaaaaactacgcaaatcctgatctttccctgaaaatgctcgccggcatggcaggcctttcctccgcctacttcggcaaaattttcgccacgcagatcggctattcgttcagcgattacctcagcaacacccgcatgaaaaaggccgagcagcttctgcgtgagactaagctgcccatcaaccaaatcagcgaagccatcggcattgtgaacacgaactacttctattctatcttcaagaaaaagtatggcatgacaccgctcgcctaccgccgcacgcgttccggcgaagcggaagatataaaatccgaagaacaggacgaaaccacagagtaattcacccggtttcacggaccgttcacgaattgttagcagttgattttcataatttttcggaaaatgaattgattttttgtgcatttacgcttataatgtgtatagaacattgaaaggcggcgagcaaatgcgcatccgtaaaaaaccacttggagacaaaaacttagtcggcgcacgtattgagagcattcgccgcaatcgtggcatgaaacagaaagagctgctcgcgcagctgcaggtgcgcggtgttgacatcaacgcctctgccctctctaagttagagggtcagcttcgcaccgtcacggatatcgagcttttagccttcgccgaaattttagacgtcgatgtcttctggctcctcaccggcaaatcccaacagatttaaaaccaaaaccgggtagcacaccgcacggcagcttacccggtttttcttttgcggatttttatcgcttactcgcttatcccctgcacccaaaatatgctatatgcaaaaattcccggagagcacgcagctttccgggaatttcatttagcaactattaaaaattactcgaagcaattcgctttggcaaattactttttgctcttctcgcccttatgcacagcccacatggtgtaaagcggagccgcaatgcacagagaggaatagcaaccgacgatcgtaccgaccatcatcggcagtgcaaagctctgaacagagctgatgccgtaaaccgtcgcgacaatgtagattacgagcagcgccatgaaggtggtgagagacgtcagaatagaacgtgtcatcgtctggttcaggctcttgttgacgatacccggcagcgcgtccgggctcttcgtcggagagagcttgcggttctcacggatacggtcgtaaataacgatggtatcgttcagcgagtagccgaggatcgtcaaaatgaccgcgatgaaaatatcgttgatggagaaaccgaaaatcacaaacgagaagtacacaagcagcacgtcatgcacaagtgcgatgagcgccgtaacgccggcggaaagaccgccgatcttcttaaagcgcagtgcaatgtacacaagcaaaatcacaaacgtgatgagcaggcaaacaaggcacttctggaagaacttcgcgcccatggtcgggtcaacagagctcgattccaccacgttgaacgtgcggtctgcatacgcatcggaaagcttcgtcgcgattgcctgctgctcatcgagcgtcacagcctcgttgcctgcaaaggacaacgtaacctggttcgcgtcggtgccgaacgtcttgctcagcgcaacggaaacgtcgcggccagtctcctcttttacgagggacgcgatctcatccgtatcgacttcgccgtctacggaatacttgatcattgcaccgccgacgaactgaatgtccatcttcgtgccgcgaatgaagttgaagatcaagccgatgacgatcaggccgatcgagatgccgaacagaatttttctattcttatagaaatcaaaattgaactttttcattacttatccgcacctccaaacagccatttcttacggagcggcttgaagccggaaagcgatttgatcatcaggcgagagcagaacacgcccatgatgaagttgccgatcacaccgacgagcagcgtatagccgaaggagtagatcgcgccggtcgtggattcgccgaagatcttagagagaatgttggacgggccgaacacgccgatgagcatgatggcaacgatcaaaatcgtaatgttgccgtccacgatggaccacaagctgttggagcagcccttctgaatagcgccgtccagcgttttgccggtgccgagctcttccttgatgcggctcgcggtgatgatgttcgcatccacgcccacgccgatggaaaggataatgcccgcaagacccggcagggtcatcgtaaagctgttcacaaacgggaagtagccggagatcgccgcaaaggtaatggccagctggcccacaagggacagtaccgccgcaacgccaggaatcttgaacatcacgatcatgaatacagcgatgagcgcaaaggcgatcacgccggccatgaccatagcgtccagagacttcatgccaagcgtcgggttcacggtgctgaagttcgaggtctgcaaagcaaacggcagtgcgccgccctggatcttcgcagcaagctcagaagccgtagccgccgtaaagttgccggtgatggaagccttgccgtccgtgatgaccgcgttaacggtcggggcggagatcatgatgtcgtccatccaaatggagatcgtcttgcccttcaggcgctcggtcgcctctgcaaacttctgtgcgccttcatcggaaagcgtcagggagatcgcatagtcgtagctgccggaggtggagttctcctgcatgaccggctttgcctcggtcacgtcgctgccttccagaataattgtatcggccgtagtgcccgtcggtgtctggtaaaccgggttgccctcgccgtccacggtctgggtctcgtatgacttgccctcgcggaatgtcagcagcgccgttgcggaaatttcttcaatcgccttctccgggtcaaagtccgattcgccgctcttccacgggaaacgaacaatgatcttgtcgttggcttcgtcggtgtaaatctcgtagtccgtaatgctcttcgagaccatacgcagctcaatgattgcctttgccgcttcaagctgctctgcggtcgcctccacgccttcagccgggctgaaggtcgcttccacgccgccgcggatatcaataccccatcttatatcgccggcgcccttgatccatgtgttcttcgtgtcaccgttctgcgtgtaaacgccgaagaccgatgtgtatgtaagcgcaaggatcagagccgcgatgataaaaaacacaggttttttcacgcgcttcatctaattgtttcctccaatggataaaaccgccgttttatccgtttacttttaaaatgtccgtcatgtaaagcagggtggcaagaaccaccctgcaaatctacacctgacgatttaaattattcctcagaagcgtcctcgccctggtcttcgagcagagcacggatggagagggaaactctcttcttgtcgaaatcgatgtcggtaatcttcaccttaacaacgtcgccaaccttcagaacgtcctgcggcttctcgattcttctgtccgcgatctgagagatgtggatgagaccgtcgatgcccgggagaatcttagcaaatgcgccgaacgtggtcatgccgacaacggtagcgtcgcaaaccgtgccaaccggatactcgttcttgagaatctcccacggattgtcttccttcttcttgtagccaagggagatcttgccgttctcacggtcaaggctcttgacataaacctgaacggtgtcgccgacagagacaacttcgctcgggtgcttgatgcggttccaagagagctcggaaatgtggatcatgccgtccacgccgccaaggtcaacgaatgcgccgaagttcgtgagggacttaacggtacccgtaaactcctgaccttcttcaacagactcccagaacttagcctgtgctgcctttctctgctcgcggagcacggaacggatggaaccgaccgcacggcggcgctggcggttgacttcgatgatgcggaactgaacgtcctgacccttcagagcctcaagatcgtcaccgcgatttgctacagcctgagaagccgggatgaagacgcggatgccgttatacagaacaatcacgccgcccttaacaacttctgtaaccttgccggtgaggatttcttcagcgtccatagccgctgcaatgtcttcccagcccttgatggcatcgatgcgcttcttggagagcatgatggtgccttcctgatcgttcgtcttcatgatgagcagatccatctcgtcgccgatctttacaagatcttccggcttcgcgttcggatcgttgctaagctcgttagccgggatgtagccggcctgctttctaccgacgtcaacatacacttcggtgggagaaatgcttacaactacaccgtgcaccttttcgtctgtatttaagctcttgagtgattcctcaagcatctcctcaaaattaagctcatttgtttcaattttgtctgtcatggtaacaagtacctcctttattatgcttgccggtgttgaagcaccggcagttatgccgatattcattttgccctttacaggcagggctgcaagctccgccgccgtctcaatgagatacgtctgcgcatacggttcacagacctccttgagcttcgcggtgtttgagctgtgacgcccgccgataacgagcatcaggtcgctttcacgcgaaagctcacgtgcttcgcgctggcgatttgttgtagccttacatattgtatcaaaaactgaagcgtttgtacataccttttttacgaaatccaaacatttttcccattcttctacgttaaaagtggtctgttcacagaaaagaaggggcatttcggcaagttcaggctcatttttgaataaattttcgagttcttcgcgcgttttgaaggtacggtacggcgttttgcagcaaccgagtatgccctccacctccgggtgtttggcatcgccggccagcatcacgcgcctgccctcgcgctctccgtcggaaacaaggcggtgaatcttctgcacatacgggcacgtcgcgtccttgtaatcgacaccgagcactttcagtttttcgatgacctccggcggtacaccgtgagagcggatgacaaccgtctcccccgctttcgcgtcctcgggcgcatctataatgcgcacgcctttgcggccgagctcctccacaagctgcgggttatggatgatcggcccgagcgtgcagacggttttgtcctcgtcaagcaatttgtaaacggtctccaccgcgcggttcacaccaaagcagaatcccgctgttttcgccacgcggatcatactttcttccacctgttctccataatatcgagaccttcctcgcgcagcttctgcacctcggcaaaaatattgcgcgaaacacggcggtaaatcataccggaatcttcggtcaggcccatgtcctcaaaccggattggtttgccgatattgatgaccattttcttaaacaccttcgggggcttgccgccctcgcccacaatcgccacaggcaaaatcgtacagtgcgtcttgtacgccagcattaccatacccattttcgggttcaaaagctcgccggtcttcgagcgcgtaccctccgggaacatgcacacgaccttttcttcctccaaaaggtcaatcgccgtctgaatgccctgtgccccgcccgtgccgcgggagattgggaacgcgccgagactcttcaaaaatccgccgatgagcttgttttcaaaaagctcggtcttcgccatatagtgtaattgtcgtttcggtattgcgcagccaaggtaaatcgggtcgcccatcgtcacgtggttagagcaaacgagcagcttgccggtaagcggcatgttctctctgcctataatacggtacgggtgcagaattttaaagaaaaacagcatcacgtactttgcaaggaaataccaccaggaaaggtgttccttcggcttcctattttcagccatgcttcacgcccgtcctttcttccacgatctccagcaggcggttcaccgtgccgtcaaaatccagctcgctgttgtcaagcaaaatgctgtcctccgctgccttagattgcttttcgtcctgcttgtcgcggcgaataacgttcgcaagcgtttcttcatagctcacgtccacgcctttttccttgagctccttgtagcggcgctcggcgcgtacctcgggcgaagccgtcagaaaaattttcacctgtgcgttcggcaaaatcgtcgtgccgatgtctcggccgtccatgatgacgttgtactttttcgccatatccacctgcgcggagaacagaaacttacgcaccgccggtacggaagcacacgcagaggccgccatagagacctccggcgtgcggataaggccggatacatcctcgccgtttaaaatgacgtgctgcacgccgtcttcgtatttcagatcgacctgaatgtcccggagcttcggctccaccgcttctgcgtctgcagggtcaacctcactgcgcagcaggtaaagccccaccgtgcggtacagcgcgcccgtgtccacataaacaaagccgagcgcctttgcagccgctttcgccacgctgcttttacctgcgccggcaggtccgtcaatcgctattgcatacataatataacttccttatatataatgatagtttacagattttcgcccgccgcgtgtcccgttgcaaaggcgatctgcaggttaaagccgcccgtgtacgcgtccacgtccagaatttcccccgcaaagtacaagcccggaattaatttggactgcatcgtcttcgggtcgacttcctttacggaaacgccgcccgccgtcacaatcgcgccggaaagcggtgcaaagccggaaatctccaccgtaaagtgctttaagacatccaaaagcaccgcacgctgctcgcgcgtgatggtgttgcacttctcttccggcggaatgcccgaccgccgcacgacaaccgggatcatcttttgcggcaataattcatcgagcgaattgctgaaattgcggttcttgtttttctctaaatcgcgtaaaaggcgctggtcaagctgttccggagtgagcgccggctttaagtcgagcgtcactgtgtatctgccgggcgccatatggcgcatgtgcgcgctcgcactcaaaatcgtcgggccggaaagcccaaagtgcgtgaacagcagctcaccgaagtccgtgtagaccggcttctttttcttttcattgtccgtcacggtcacaccgcagttgcgcagagaaagcccctgcatcgccgggcaatcctcgtcatcagaggtcagcgccaccaaagacggacgcataggaataatggtgtgccccagcttttccgccagccgcgcgccgtcgccgttcgagcccgtgccggggtacgaagcgccgccgcacgccaaaagcacactgggggcctcaaacacatcgttttccgtgcgcacgccgatgacgctgccgttttcggtcagcacctctttcacattgccctgccgaatttccacgcggcactttttcagcttcttccaaagcgcgtccgcaatgtcgtgtgcattgtccgagaccgggaacacgcggttgccgcgctccgttttcagcggcacgccaagcccctcaaaaaagtccatcgtgtcctgcggggtgaaatgattcaccgccccgtacaaaaaccggccgttgccgggcgtggattcaatcaccgtgcgcggctcgcagttgttcgttacgttgcagcggcccttgcctgtaatacggatcttccgcccaagctgtgcgttcttttctaataataagacgtgcttgccgcgttccgccgccgtgatcgccgccatcatgcccgcagcgccgccgccgactacgactgcatcaaacattacgttcctcgtcggtcttgtcttcgaccttctcgtacacgccgtactcgtcccaaatggtctccaggtttaagagtgtattcgccacttcgtctttctttttaatggccaccgtcacaataagcgcgttgataagcgccatcgggcccacaagcgaatcgacaaatgataccatgtcgctctttgcaagcagcacatgctccgcatacttcgtcagcggagaaagcgtgctgtccgtaatggccacaaccgtcgcaccgcggtcggaagcgtatttcagcgccttcactgcttttttggagtaccgcgggaagctgatgccgacaagcgcgtctccctcgccgatgtgcaccatctgttgcaaaatctgcgcttcgctcgtcgcgctgataagctgtacggaatcgaacaccaaggagaagtagtacgagaggaacgtcgcaatggcaagcgagctgcctgcaccgatgatataaaccttctttaccttcacaagtgcatcggccgcacggtaaaactcctcatgtgaaatagactccttcgtgcggcggataatgtcgatgtcctgatccatcgagctgtcaagcaggcggtcaagcggaatgttcgtcgaggtcatttcaaggcgttgcacgctcgtcatgcggttgcggatcatctcctgcatcgcctgctgaagcgccggatagccggagtatccgatctccgtcgcaaagcgcaccacggtcgattcgctcacaccgaccgtcgcgccaagcttcgaggccgtcataaacgccaccttgtcgtagtgctcctcaatatacttcgcgatcaacctctgacctttggaaaacgatctcgcattttgcttaatgcgattcgtaagctggatattcatgaatgatttcctttctttacgtttcctgacaggaaattttacagcacgagtcgccgcttcctgcaaaatttcctccgtgcagacgcggccgcatacctgtccctacggacagggcacacgtatacacggtatcataatgtttattttagccgatattcctgcaaaaatcaagggatattttcgctgttttctatgaatttcaaaccgtttttgcaggaagcgcatcctttcatgcaaaggtatatctgtgcagcacggatatctctctccattctttgccatcctttacaaaagaagcttgcaattcctttcgttttgttgtatccttattccgattattaaccgtttaattctgttgatttcccacaacagaataaacgcacccgtcttttggaggtcttttatggaaagtaaaacgctcatttcgtccattcgtgaaaatatcggcaaggtcatggtcggttccgaagaaaccatcgacctcttgctcaccgcgctcattgccgagggtcacgtgctcatcgaagatgtgcccggcatgggcaaaaccgtgctcgcaaagtcacttgcaaagtccgtcagtctggagtttaaccgcatccagttcacgcccgacctgcttcccagcgacgtcacgggcctcaactacttcgaccagaaagcaaacgatttcgttttcagccccggcccggcattctgcaacctgctcctcgccgatgagatcaaccgcgccacaccgcgcacgcagtcgagcctgctcgagtgcatgggcgagcgccagatcaccgtggacggcgtcacccgtccgctttcggcgccgtttttcgtcatcgccacgcagaatcccatcgaaacgctcggcacctatcccctgccagaagcccagctcgaccgctttttaatgcgcatttccatggcctctcccacaaaagagcaggagcgcgccatcttgcagcgctttatgaaggaagagccgctcgaaacgctgcaaagcgtctgcacgcgtgaggatattcttgcgctgcaaaagcaggcaaaggagatttacattcaccccgtcctgctcgattacataatcgacctcgtgcaggccacgcgcagttggccgaatatcgatatgggcgtcagcccgcgcggcagccttgcgctcgtccgtgccgtgcacgcttacgccttggtgcgcggcggcgcatacgtcgtgccggaagacatcaagaccgtcgccgtgccggtgctcgcccaccgtttgcagctcagcggctccgtcggctccaccgatgcccagaaaaaggccatgaccgatgtgctctcctccgtcgccctgccgactgaggactggtcaaagtaatgtgggcgctccttctgctcccgatcgttttgctcgtcctttactttgcacagcgccttttgttccgccgcctgtggaacgaaaacctcaccgtacagatattctttgaccgcgattacattttctgcggcgaggaagcgaatctcgtcgaaacgatcgtgaacaacaaatacctgccgctccccgttttggaggtcggcttcgatatgagccgctgggtggtgtttcaggacgaagaaaactccaccgtcagcgatatgacctaccgccgcgacgtgttcacagcgtccgtgcgccagcgcatcacgcgtacactacctgtccgcggcaaaaagcgcggctattaccgcatcgcgtccaccacggtcacgtcctacgattttctgatgaccgaaaagcaggtggcgcatttcccgcaggaaacggagttctacgtcctgcccgcgcacatttccgcaagccacattcgcattccgtacagcaagatcacgggtctgctcgtcagccgtcgacgtgtgtacgacgacccgttcgagtttgccggtatccgcgattaccgccgcagcgaccccatgaaatacatcaactggaaggcctccgcgcgcggcggcacgttactcgtcaatcagcacgattccacgctgtcccaaaaggtcactgtcctgctcgactgcaccggcatcggcagcgccgtgacggatgcgttaaacgagaccgccatctccatcgccgccgaactcgcggaacgcatgctcgcagacggcatctcggtctccgtcatttcaaacggcatagataccgtagacggcaaaatgctctccaccggcgagctcaccagccgcaacaccgcactttacctgcgccgccggctcgcaagattggaatgccgcaacgacctcacccccatgccgcagcttctccgcaccctgcacgacggcgcacacggcagcgacctctacgtgctcatctccaaggagcaaaagctgcccgttctgccggatttggaagccttaacggagggcagtgacgccatctggatcctgccggaagaccgcaacatgccggagcgctacaaactcacggagacctcaaaatccgtcgaaatcgtccgctgggaagtttaacgggaggggacaaaatgaaaattttcaaaaagcaaattcccgtccgccacattttatacgtcgtgctcggctggctgcacgccaccatgctgtgtgtgccgctttacgcgctcgttttaaattttgtctcggagggcatgataaaagacgtcatcctgcaaaacatcctgcggggatttttgattctcgctcccatcgcactcagctggttcgcaataaaatgcctgcgccgcatctttttctatattctcgcaagcatcggcatcacggtactcaccggcttcctgttcgattccgtcctcatggccgtcgtcgcgctgttcatctgcttcatgcggctttacggccgcctgcacggcgaaagccactctctatttgaccacgccggctatgcgggtcttgccgtgttcgccgtgccgttcctgtgctctgtcttcaccgaccgcgccgatttgattttccagcccgtctccctcgttttcgcggccgtttacttcgtgctgtgcctcacgcagcgcggcatccgccgtatcgatgattacatcgacgtcaacgccgccatgcagaacatgcccgtacgccgcatcgtgcgcatcacctgtgcgcttttggccgccgcagccgtgttctgtaccgccgttttgctgccgccgctgctcacaaacgacatcggctaccgctacaccccgcgcgaggcggtccacgccgaatacaccccgcccgagcagaccgaaacatcctccggcggcaatatgccgcttgacgagatgatacccgccgcagagcctagccccgtgctcgtcctcatcatgaaaattctcgagtacatcgtgctcatcgcgctcgcgggcggcctcatcttcggcgttatttacggctgcatccgcatctcgcgcgggtttaaaacctcgtttgtcgatcggcgcgaccttgtggaaaacctgcccgaggacgaacgcaccaccgtgcgggaacgcgcccaaaagcgcgaccgtcccggcttccttgaccgctccccgaccgctgcggtgcgccgcaaataccgcaaaacgctgctgcacgccgcaaaagagccgcccgcgcgttggatgtcccccgccgaagcggaagcccacgcgaagctccaaaacgatgccctgcacatcgtctacgaaaaagcccggtacagcgaaaaaggctgtacaaaagacgacctcaccgcaatataagctgtacaaagcgaacagcccatggcacacggaaaaccgcagccatgggctgttttattttatatatttctgtacaagcgggtgcagtctgcgaatgtacaggacgatcagtccgttcatcgagtaatcgtacagtacaaacaccacattcagcatcaccgccaaaatcgggacagaccatttgccgaacacttccatttcggaaagcgggatctgcaaaacccaaaccgccatcgtcgtttccagcgccatcgccagattaaacacgccgaattttgcaagcacacgcaaaggcttacgcttaatgcgcatcaaaagtccgtacagcgtcgggtagtaaccgaaaaataaaatgtaaaacaaaatcgcttctctgtccggtgtcagcaaaatcgccaacacactcacaacacaatacaccgcaaagccgtagcgcacatttgtctccgccacaatggcaatcgtcaaacagcccgccaatgcaggcagtgcaatcgtcgcaatgggcacaatgccagtcatcagcatcagcaccacggaaagcgcagaaaccacaccgcacagcgcgaccttcgccgctttagagcgcatgaaaacgccccccttagcagcaggggatcaggtcgccgcccatgcactcgcaacagcagtccgcgcaaatcagaccgttgcagatgtcacaggcgttgcacccacccgcattgttcatgttcatattcggattgtagccgccgtaaacgccgctgcgctggttcatggcctggttcagcgccgcctgatactccgggtttcccgggtccatctggcacgcgcgcgtaaagtgctccttcgcttcctccagccagccgcgacggtataaaaccgtaccttttaagaaataccactcggcgttacggctttccaccggcacgccgtttaagatctgctccgcgtctgcaatgcgccccgccataatgaaacggcgtacatcgttaaagccggaggcactgctgccacccgcatacccggcgttataacccgcattgtacgtgttatagttgttgtagccgtaactgttattgttcgcaccgcggtttttgcgctgcgaaacaatggtgtcgtacgcctcattgatctctttcatcttctcgcccgcaagctcggagagcgggctgtcgccgtattgatccgggtggtacttttttgcaagctttctgtatgcgtctttaatttcttcatccgtcgccgagggcgacaccccgaggaccttatacggatcagtcatgtcgtttctccttctttatatgcaggaaaaggatctccctttgcatttccgggagccctttttcaaaaatattctccaaaattcgggtaaatttgccgctcggcaataggttcaccgccggcagcagccgtgcaagcgagccgtttaataccgcattgcactcttcgtcggcccttttgcgttcttcgggcaataaatgtaacccgcgcgagctttccagtcccagcttttgaataaacgggttgaatttctgctgtaaaaggtcatccgtaaggtcgtccgctgcatccataatgtagatccagcgcccgaggaaataccccacctcgctcaaaacggccttttcgcccgcattgctgccaagctccgcgcagatcgtctgcagcatctccgccgtcggcgcactgcatcggtcaatggaaatttccttcgcgtgttcggcatcggcctggtcgtccatcattttctgcacggcgtccgccataaacggataatcattgctcgcctttttcatcgcgcgtcgcgcaaataagcgcagaacgcgtgcgccgaacgctttcagcccgtcttcatccgcggcggtatcgcgcaacttgtgcaccgtcataatgatgctcagtgccgctgccttatggaacgcctcttcggcaaacacatcctcgttcgcggggcacacatacgtgcactttttcatcgggttgcagcagcatcgctttttctccgcctttacatcggcatcgcgctgatttagtgccagcatcgcatacagcgtgcagtcgtagctcagcgtcagccgcatcggaaaaccgtaatattttccgagcgcccggcaaagctgacagtaaacgcctttatatgcgtcgtattctttcacgagcatctcgcccttgaacggacgcacatagccaaacataccgcaaacctctcctttccgttcttcattctacccgatttacacgcaaatgtgttgaacaaaatgtaaatatgaaccgcccgcacccctgaaagacgcaaaatttccggctttatatcttggacagattctttttccgtgtcaatccgtttaaagccgcaaaaacgccgcgcacccgaaaaccgggcccgcagcgtcatacgtcactttgaatttgtcaggctttctgctccgccctgcgctttttgtcacgctccagcatcattttgatatactcgccggtgtaggaacccttcgttgccgccacttgctccggtgtgccctccgcgatgatcatgccgcccttgtcgccgccctcaggaccgaggtcgatgatatggtcggccgtcttgatgaggtcgaggttgtgctcgatgacgatgaccgtgttgccgccgtccacgagcttttgtaaaacctccacaagcttgtgcacgtccgcaatgtgcagaccggtcgtcggctcgtcgagaatatacaccgtcttgccggtcgggcgtcggctcagctccgttgcaagcttcacgcgctgtgcctcgccgcccgaaagcgtcgttgccggctgaccgatcttgatgtaccccagccccacgtcgcacagcgtgcgcagcttgcgcgcgattttcgggtggtccttgaagaacgcaaggccctcctccaccgtcatttccagcacgtcgtaaatgcttttgcctttgtatttcacttccagcgtctcacggttgtagcgcttgcccttgcatacatcgcacgcaacgtaaacgtcgggcaaaaagtgcatctcgattttaatgatgccatcgccctggcacgcctcgcagcggccgcccttaatgttgaacgaaaagcgcccggaggtaaagccgtgcattttcgcttccggcgtgctggcgtacagctcgcgaatatccgtaaacacacccgtatacgtcgccgggtttgagcgcggcgtacggccgatcggtgactggttgatctgaatgaccttgtcgaggttctccatgccgcgaatttccttatgcttgcccggcaccgtgcgcgcgccgttcagctcgcccgccaaacgtttatacagcacctcgttgatgagcgacgatttgcccgagcccgaaacacccgtgatacacacgagcttgccgagcggaatgtccaccgtcacgtttttcaggttgttttgctgcgcaccgacaatggtgattttcttgccgttcccttcgcgtctggtctgcggcacggggatgaaccgctgcccgctcaaatactggccggtgatggactccgggcacttcaaaataccctgcacgtcgccgctgtaaatcacgttgccgccgtgaatgcccgcgccggggccgatgtccacaatgtggtcggccgaaagcatcgtgtcctcgtcgtgctccacgacaataaccgtattgccaaggtcgcgcagacgcatcaaagtcgataacagcttgtggttgtcgcgctggtgcaggccgatactcggctcatcgaggatatacaaaacgcccatgagagacgagccgatgttcgtcgccaagcgaatacgctggctctcgccgccggaaagcgtcgccgccgcgcgggaaagcgtcagatattcgagacccacgttgcgcaaaaagccgagacgtgaacgaatttccttcaaaattgccgccgcgatcatctcttcgcgcggggtcagcgtcaacgtatcgaggaacgccagcgcgtccacaacggaaaggtcgcaaaaatcactgatattcttgccgcccaccgttacggcaagactctctttggaaagacgcttgccgccgcatgcgtcgcacggcacagcactcatgtacgactcgatttcctccttgatccatgaggaggacgtgtcgcggaaacggcgctcaaggttgttgatgatgccctcaaactctgtctcatacgtgccgcggccgtactcgcttttgcggtgcaccttaatcttctcgcccttcgtgccgtaaagcagaatgtctacaagctccggtgagaggtcgcggatcggcgtatcaagcgaaaaatggtagtgctctgcgagcgcttccatgtacatcgtcgcaatggtgctgccctccatcgcccaaccgctgcccttcaaaccgcccttacgaatcgataagcggtcgtccgggatgatgagcgccggatcaatgcgcatgaaaacgccgagacccgtgcacttcgggcaagcacccgcagggttattgaacgagaacatgcgcggcgaaagttcctccatgctgacgccgtgctccgggcaagcgtagttttgagagaacagcgtatcctcgccgtccaccacgtttacgataacaagcccgccggaaagtcctgtcgccgtctctacagaatccgccaagcgcgagcgaatgtccggcttgatgacaagcctgtcaacgacaatttcaatgttgtgcttcttattcttctcaagcttgatgctctcggaaaggtcataaatgatgccgtctgcgcgcacacggacaaagccgcccttgcgcgccgcctcaaactccttttggtgctcgcccttcctgccgcgcaccaccggtgccaaaacctgaattttcgtgcgctccggcatctccatcacccggtcgacgatctggtcgacggtctgctggcggatctctctgccgcagaccgggcagtgcggcacaccgatgcgcgcgtacaaaagacgcagataatcgtaaatttccgtcaccgtgcctaccgtggagcgcgggtttttggaggttgttttctggtcgatggaaatggccggcgaaaggccgtcaatgttatcgacatccggcttttccatctgcccgaggaacatacgggcatagcttgaaagcgactctacatagcggcgctggccctcggcgtagatggtatcaaacgccaaagaggacttgccggagccggaaagtcccgtcagcacgaccagtcgatcacgcggcagctttacattgatattttttaagttgtgttctcttgcaccggtcacggtgatgtactttgaactcatttcggtttaccctttcgtttcttcctttttgaagctcgatatttccacccacgcggggtaaaaacccgtgttgagggcgatgttctgcgaatgtaaattggcgagcactgtgccgtaaaacggcgttttgccgagcgcttcgatgcggtcacacagcagacttacaagtgttgtgccgagtccatgtccgcggtaccgttcttttacgtcgatgccgacctgccacagtgcgtccgtgtctgccgaagcacccgccagcgccgcgatctcgtcgccgtcatacgccgcgagtgcgaggacgtccgggcgatcgggattttctttttcacttaacgcattcggaaaatccgtgttcgggtataacgttttcacgctcgttttgtcgaaccacttaagtgtaaaggcgtccggaattacacgtgctttgcgcggcttgccgggcaaaaacatgtggaaggtcgacgacaatgtgtagtcgtatttgttcagctcgcgttcgatgcacagcaaatgcggaagctcgaacaaccagtacgggtgcttgaagcgctcggtatcgcccgtaaactcctttaaaaacgggtgcaaaacctcattcgccgtgataaccacgccgctgccggtttatgccatttggaagaacggcaactcatgcgaatagagccgcacgccatcgggcttcgccggcgttgtggcagtcacttgatttgctgtaaagtcttctggctttgcattgtattccaatgccaattgacgcattgtctccgtaaagcatttcgccttgtcaatcatgtcgaaccccctatttttccagctccttgatgcggtcacgcaggtaggctgcgtgctcgaactcaagcagctttgctgccgccttcatctcctttgtgagcttgtcaatcatcacgcgcttttcggcggccgtatacttcttctttttcttcgatttaccgcccgcttcctccgcctttgtggaaatctccaaaatctcggagacctttttcacaatggtctgcggcacgatgccgtgttcttcgttgtatttttcctgaatggcgcggcggcgctccgtctcgcgtatcgcgtattccatcgacggcgtgacgaaatcggcatacataatgacctcgccatgtgcatttctcgcagcacggccaatggtctggatgagactgcgtccgctgcgcaggaagccctctttatctgcgtccagaattgcgacgagcgacacctccgggatatcaaggccctctctcaacaggttgatgccgacaagcacgtcaaactcgccgagacgcaggtcacggatgatttccatgcgctccaccgtatcgatgtcgtggtgcatgtagcgcacgcggatgctgtaattttcaaggaagcccgtgaggtcttccgccatttttttcgtgagcgttgtcacgagaatacgctcgccgcgcgcggtacgcacgttgatctccgaaataagatcgtcaatctgcccgtcggtcggctttaccgtgatgcgcgggtctaaaagtcccgtcgggcgaatgacctgctccacgaccgctgcggatttttccagctccaagtcgcccggcgtggcgctgacgaagaccgcctgattgacgtgcgcatagaactcatcaaaattcaacgggcggttgtcatacgccgagggcaaccgaaagccgtaatccacaaggctctgcttacgcgcgcggtctccggcgtacatggagcgcacctgcggcaacgtcacgtgcgattcatcgacgaacagcagaaaatcgtccgggaaataatcgagcagtgtgcacggctggctgccgggcttacggcccgaaagcacgcgcgaatagttttcgatgcccttgcacatgccgatctcactgagcatttcaatatcatagcgtgtacgctgctcgatgcgctgcgcttcgatgagtttatcttcggacttaaagaacttgacgcgttcttccatttcggcctcgatctccttgagcgcgaccgccattttttcgcgcgggacgatgtaatgcgacgccgggtagatggcgacatgctttaaatcgctgacaatctcgcccgtaagcggcacaacctcgctgatgcgttcgatctcatcgccgaaaaattcgacgcggatcgccttttcgctcgattccgccgggaaaatttccactacatcgccgcgcacgcggaacttattgcgcgtaaagttgatgtcattgcgctcgtactggatctcgacgagcttctgcaaaagcgcatcgcggcttttttccatgccggggcgcagtgaaatgaccatcgtgcggtaatcgattgggtcgcctaagctgtaaatgcacgaaacggacgcgacgataatgacgtcccgccgctcagaaagcgcactggtggcgctgtggcgcagcttatcgatctcctcgttgatggcgctgtctttttcaatataggtatccgtctgcgcaatgtacgcttccggctgatagtaatcgtagtaggaaacgaagtattccacggcgttatccgggaaaaactcgcggaactcgctgcaaagctgcgcggcaagcgttttgttgtgtgccaaaacaagcgtgggacgattcaattccgcaatgacgttcgccatggtgaacgttttgccgctgcctgtaacgccgagcagcgtctgctccttatgccccgcgcggatggactccacaagttctttgatcgccttcggctggtcgcccgtcggctgatattttgacttcagtacaaatttatcccgctcctgcatggctttgctcccttactgaacttttagaacatacgtttcgctacgacttagtataacacacgaacacccgtttgtcaatgcgtcccgccatttatgtccgccgatgtcctgtaatgttcggcttttacgtaatgatctgccgttttagggtggcgatgtcgtggcgaagcttttggaggacgccggtcgcgcgcatggagaggtaatcctcgtccgtgaaaatgaagtggtcggagaggatgacgtctatgccggagagtgcgagctcgatctccttggttgtttggatgtcctgccgtgagggcgtgcagttgccgcttgggtggttgtgcgcgaggtaaacggcatcggcgtcgtacaaaaggcacagccgggcgatctgacggatatagatgggcacgccgtgcacggagccctcgttgacaatacccatgtactttaaataccccttgctgtccaaaatgagcagcacgacgatctccgtttttctgccgaaaaatttgttctgcacggcggcaaaggcggttttggtatcgacaatacgggtgcgcgcctgatttttcgactccatataggcacggaacaagtccgggtaagcggcgagcgcacttgcaagacgcgggccgacgccggggcactccgccaaaatctgcgcgggggtatcaaacacgtcgctaagttttccgtgtcgctccaaaagtgcggccgccgttgtttgtgcgggacagctcgggtccaaaaggtgcagcgcaaacgtcaaaatatcgagctccgtagggttagacgtggtattcagctttaaaaactccgcttcttcttccctttttcgtcttgcggccatggctttcattcctttcaaatgcttgaaaaagggcagcaccgcctatgggtgccgcccggttttcagcggtcgatataacgttcgataaagctgcgcacagcgctccaatagagctttggcgcgacggaggcggaaaggcagtggcctgcacccggcacggtaagcaactgcttgtcgcagtttgcggcttcgtaaaggcgatacaccatggcgcacggcacgagggcatcagcctcgccgtgaatgaacagcacgggaattttgcagcggcgaatctgattaagcgcactcgcttcgcggaagctgtacccgaacttcactttggacgcaagcgacactgccgggataagcacacccattgcgccgccgtacagatctttgacagcggctttggcctgatcccacacagaggtgtagccacagtcttcaatggcgagcttcacctgcggcggcagctgctcgcccgtcgtcatcatgacggtggcagcgcccatggattcgccgtagagaaggatctgtgcgtctttgtcgcggcgaataatctcgtagatccagccgatgatatccttacgctccggccagcccatgccaatccagtcgccggcgctgtcgccgtgggcgcgggcgttcggcattaaaatgttaaagtcgaggtcataaaacgacttgccgcggtggcgcatgcactctgcgcggccgccgtagccgtggcagatgatggcatagcggtggcctttgtgcggaatgaaccatgcagtgaggcgcatattttcggggttgcggtacgtgacgcgcttggcatatttcttgaaccatactgttgccgcacgggtttcttcatcgtccggcagcgggtctttgttcggcgggcggcggcgcagggtatcgtttaaaacggcgttggagacaaccgcggccgcacctgcagccaatgctgcggcgaatagtgcttttttacccataaacacgcactccttttggtttactttgtgtggacagcgatgacggtatcgatgtcatcgggcagttttacagtgttggaaacctgcacgaacacgacgtccgggtagttttcaacgatccagtttttaaggggctttatctcggtgccgtcggagatgagacggatagactcaacctcatcgagcgaaatgccctgcaacgggataccgccgatggagctttccataatgtgataatagagcgttttgccgtttttggtgatgcgaccgttttcgggcttcggcaggtcgcagccgccgcagccgtaaatggaatcggaattcttctgcatccacgcgccgattttttccagaatctcgacggactctgcggggatattgcctctggcatccgggccgacatttaagagcatattgccgtttttgctgacgcactcaacgagctttttgataatcatttcggcgggcttaaagttcttatcctttgcgcagtagccccagttgtcgttcatcgtgatgcaggcttcccaacagatattgcggccgcggctgtccttaaagccggtctgcgggatgatctgctccgggctgacatagtcgccgctgtactcaagcggttcgtccgttgcgatggagccgaagccactgccgctgacctccagacggttatcgatgatgatgtccggctgcagggagcgcaccatacgcacgagctccgacgcacgccacgcttcgccggtgaggtcgtcgtaggaaaagtcgaaccacatcatatcgagcttgccgtagtttgtgcagagctcgcgcacctgaccgtgcatgtaatcaaggtagttatcaaagttatagggcttatctttataggcaatgttgttgcgcataggatgctggcggtcgccgtaggcggggtaatccgggtggtgccaatcgagcagcgaataataaagaccgaccttgatgccctctgcgcggaacgcgtcgagatactcacgcacgatgtctttgccgtaaggcgtgttcgtgactttccaatcggtaagagcggaatcaaacaggcagaagccgtcatggtgctttgcggtgagcacggcgtacttcatgccggcctgctttgcaaggcgcgcccactttttcgggtcaaaatctttcggattaaactcgttgaaaaacgggatgtagtcctcctccggaatctcttccgtggagcgcacccactcgccgcgcgcagggatggcgtaaagaccccaatggatgaacatgccgaagcggtcgtgggtaaaccactgcatacgcttatcatatttttctctatcaaatttatacatacaaactccgtcctttcgcccgctatttcggggattcttactgtgattgtatcatttcgcccggcttttgtaaatagatattcgcgcgaaaaaaggaaagaaaggcaccgcgcaaacagcgcggtagatacgcgtgagcacgacgccctatccccctgcaatgatagagcaaccccgttgcctcttttaaatcgggcagcggcggcgttatgtgtaaaggagtgtagctttatatttgtgtaaagtcatatagctgcacagatatgcaaaaacgctcgtccgctgataaactgggacgagcgttttgttcacttatttaagcggatttccgatcaatcagaagttgccgttggtgagatcctcgacgtagagggtcttcgggccgttgttggccggtgctgcgggctttgcagccggtgcagcttctgcggcaggtgcttcatccttatgcggattgtcgcgccactcaaagaactttgtagcaacagccgggaacagtgcgtaggagaggacatcctcttcgctctttgctctgtcgccgatctctgctctgtacttctcaagctccggctcgatgaggtcggcaggacggcaggtgatgaccttgtcatcgccgatgcacttcttgcggacttcctcgttcacctcgcccggcaacttgccgtattcgccgcgcagcatgcccttgctctctttggtgaccatcttatagcgctcaccgacaagaacgttcataacagcctgcgtaccgacgatctggctggtcggggtaacgagcggcgggtaaccgaagtcagcacggacgcgcggcacttctgcgagcacatcatagtacttgtcttctgcgtttgcctgcttgagctgagagataaggttcgaaagcatgccgcccggaacctgatacagcagcgtgttggtatcgaccttaaggaccttcgggttaatgttcagcttatctgcaaccgtacggaagtgtgcggcaacctcgctgagcttctcaagatcaaggccggtatcacggctggtgtcctgcagcgtggcaacgagggactcggttgccggctgagaggtgccgtttgcgagcggggagagagcgcagtccacgatgtcaacgcctgcctgtgcagccatcaggttgaccatgtcgcctgtaccggtagtgttgtgggtatgcagatggatcggcacgctgacgttttccttcagcttctttacgagcgaatatgcgtcgtacggaaggagcaggtttgccatatccttaatacagatggtatctgcacccatcttttcaagctgcatagcgagctttacgaagtaatcctcgctgtgcacggggctctttgtatagctgatggcagcctctgccttgccgccatattccttaacgtacttcatagcggtctccatgttgcggggatcgttcagtgcgtcgaagatacggacgacatcaatgccgttttcgatggactttttgcagaactctgcaaccacgtcatcggcatagtgcttgtagccgaggaggttctggccgcgcaggagcatctgcaacggggtcttcggcattgcctttttgagcgttctgagacgctcccacgggtcttcgttcaggaaacgcatgcagacgtcgaacgttgcgccgccccagcactccagagaccagtaacccatgttgtccagcttttcgcaagccggaagcatatcctcgatacgcatgcgcgttgcggcctgagactggtgcgcgtcacgcaggatggtatcggtaattctaaggggattcttagccataataactgttacttcctttcctaagcgttatcaaacgccgaacagagccaggaacacaccggctgcaacagcagaaccgatgacgcctgcgacgttcggacccatagcgtgcatgagcaggaagttgcgcggattctctttctggccgacgacctgcgatacacgagccgccataggaacggcggaaacaccggcggagccgatgagcggattgatcttatccttaaggaagacgttcatgagctttgcgagcagaacgccgcctgcggtgccgagaccgaatgcaacaacgccgaggacgagaatcttaagcgtctgcggattgaggaagtttgcagcggtagctgttgcaccgacagaggtgccgaggaagatcgtaacgatgttcatcagctcgttctgtgcggtcttgttcagacgctctgttacgccgctctcacggagaaggttgccgagcatgaggcagccgacaagcgatgcagcggacggcagcatgagggaaacaaagatggtaaccacgatcgggaacagaatcttctcggtctttgtaacctgacggagctgcttcatctgaatcatacgctctttctttgtggtgagcgccttcatgatcggcggctgaataaccggaacgagcgccatgtaggaatatgcggcaacggcgatcgggccaaggagttcaggtgcgagcttggaggtgacaaagatggccgtagggccgtctgcaccgccgatgatgccgatggagccggcctgtgccggggtgaagccgagcaggacagcgccgacataggtgacgaagatgccgagctgtgcggcagcgccgagcagcaggctcttcgggtttgcaatcagcggaccgaagtctgtcatgcagccgacgccgatgaagatgagacacggataaacaccgagcttaacgccgagatagaggacgtcgagcagaccggcagcttccgtggaaccgtttgcgagcgggataccttctgcaaacatctcccaatgcacgtggccaccttcaaacagtgcggcatggtaaatgcctgcaccgggcaggtttgttaaaagcataccgaatgcgatcggcagaaggagcagcggctcgaacttcttgacgatagcaaggtacagaagaacacaggaaacagcgagcataacgagctgcagcgggttttcgccgagctttgcgaagcctgtgctattcagaaaattagttatcgcttccatgaataatttaacactccttattttagtagtatgtgcgtaggcttaagtttaacttagccaacaacgcagaggagtgtgccgctctcaacggttgcgcccttctggacgttcacgctggtgaccttgccggccttcggtgccatgatctcgttttccatcttcatagcttcgagaatcatgaggacctgaccttcagcaacggtatcgccaacattgacgttgacggaaaggatgttgccgggcatcgggctcttgacctgctcgccagcgcctgccggtgctgcgaccggggccggagcgggtgctgctgccggagctgccgcaaccggagccggtgctgcgccgccgacgacttcttctactgttacttcataagctgtgccgttaacattgacattatactttttcattgaacttacctctcatctgttagatttcgcgctttgcgcatttcagactcttttgatggaatggatgcggatgtgcgaaacgtccgtgcccatctcctcggcgatcgcgactgcgatagcggcaacgatctgctggttgttttgggcggataccgccggagcgggtgctgcagcaggtgctgcggcggccggggctgctgccggagccggctgctttttagcgaccttctccatgatgaggccgaggatcttgatgataacgatcaagcagatcaggaccacgaacacggtaataaggcccatcagaacaacctgaacggtgctgatgttggtctccataatcttacctcctttcaccgaagcgttatggaaataaaaatagaaaatgtaatttgcattctgaaaaaaacaccacattcccgcattttatcagaatggttatatcttaacacggaattcaaaatttcgcaatgcttaattcaacttttttaaccgatattttcggaacgaaagtctgtttggagtaattcctgtttgaacgccgaaaatccggcaagaacacgccgcttctctccagttcaaaatattgacgaaaaactttcttttatcccgttgcattttagtagaaaacatagtaaaattgagttatctgttatttagcatgggctttctttccaaaaaagcgaatagactgcccaaagtattgaaatgaggcgaagacgtgttttcaaacaaagatctgcggaagctcatcataccccttgttattgagcagcttctggccgtaaccatcggtatggcggataccgtaatggtctcctcctgcggcgaagcggcggtttccggcatctcccttgtggactccatcaactttttgctcatcacgctgttttcttctttggcgacgggcggcgcggtcattgcgtcccagtacatcggacgcggcgaccacaaaagcgcgagtcttgcggcaaagcagcttttctatgccagccttgcgctttcggccgtgctgggcgtcatcgccgtattcttccgcaagccggtactgaacatggttttcggctccattgaagcggacgttatggcgcacgcacagatttattttttgctttccgcgatctcctatccgttccttgcggtctataacgccggtgcggcgctgttccgctctatgggcgattcgcgcacgacgatgctcatttccattttaatgaacaccatcaacatcgtgggcaatgcgattttaatctacggcttccagatggctgcggcgggcgcggcgacggcttctcttgtttcccgtgcagtaggcgccatcatcattacggtgctgcttttgaacccgcgccgtattattttctatgataaactccataagccggaaatccacctctccatgttgaagagcattttgcagatcggcgtgccgaacggccttgagaacagcattttccagatcggcaaaattctggttgcaagcattgtttcgggcttcggcaccatttccatcacagcaaacgccgtggcgggcaacctcgcttccttgcaggttattccgggcatggcgctcggcatggcgatgatcacggtcgtcggccagtgcatcggcgcaaaggactacgaagctgtgaaaaagtacacgaagaagctgatgctcatcacctacggtgtcgtctgggctatgacgcttttgatgctgctgttcagcaagcagatcctttcgttctactcactctccgaggaaacgaccacaatgacgatggaggtcttcattgtgcacggcatctgcgccgtcattgtttggccgctggcctttgccctgccgaacgccctgcgcgctgcgaacgatgtgcgctttacgatgattgtttccctgctttccatgtggatcttccgcatcggcttcagctacattctggcgatctactttaacatgggcattttgggcacatggattgcaatgtgtatcgattggttctgccgcggcgcctgctttgtcatccgctttgcgcgcggaaaatggaagaatatcagctttattgataactaagaaggaggtaaaaccgtatggaatatgatgcttttaccggcggcgttgcgccgggcggactgcgctcgaaaagcgatatccgcattttgatctgctatatgctcaaaagcgtgaacgcgccgctttcgggcgatgacatcatcaaggtcttgcaggaaaaatcccttgcgaattactttgaggcgagcgatgcgctttctgcccttgtgagccttggcaatgtcacccgcgaggaggacaacacctatgtgctgactaagcgtggcaagagtgtggcggatgacttagaacagcttatcccctcttccgtgcgtgataaggccgtagccgccgccacggctctgctggcttccgctaagatggagcgcgaaaacgtggcgaccattgtccgcaccgaaaacggctacaacgtgacatgccacatttccggcggagaaatggagctgatgagccttaccgtgtatgtgcccgacctatatcaggcacgcgaagtgaaaaagaactttcaccgcgacccacagcgcgtgtataacctgatgctcgcggcgcttaccggcgacgacgagatgatgaaaagcgccgtaaacccgtgagtttccgtcacctttaaaattccgaagagccgcagtttttgcggcttttctttttcttcacttcctgtttttccgaacgttctgcacctgtcgtcaaaaaccgacatttttctatatgcgtattgtgtatacttatatatgaaagcagtttgagtttgcacagaatatacacatcattcgcgtgaatatttctcacgtagtcgtgcatagtggcgcaaatagcgtatactatcattgtatcttctgtttgtatctcgcgcaaaagatacaacacagttatgtgcacgattttcacggaatgacacagcggatggtgaacagcaatggaagaaatagaatctaaagcaatcttcggccgacgtctcaagcgtttccgtgaagaaagcggctacacgcagtcgatccttgcgaatattcttggcgttgagcgttccacctacacgtattatgagaccggcaaaacgacacccgccatctttgacctgatgcgcctttgccgtctttaccgcatttctttggatgagctgtgcggatacagcgcaaactctgtagatgcgatgcgtctgagcgattccggtcagcgcgtgaaagtgtatgcacgccgcaaagagcgtcgttaccttgccgattctgtgctggatctttctacagatgagcagcagcttttggcgtattatcgttccgcttccccggaagatcgtgcggagctttttgaacatctgcgcaatgcacggtaccgtgaccgccgccacgcaaacgaaaaataaccttcaaaaatttcatatgcgcttgtagcccagttggatagagcgacagactccgacatttcaggcgtctccagttgaggtatggcgcaaaactttgccgcacctgcgtttgcgggaacagcagagaagaaatagctggtcgttgactactatttgatgactattgcagaaacccacaaccaaatatgcgcccgtagctcagttggatagagcgttagactccgactctaaaggccgctggttcgaatccagtcgggcgtaccaaaatgtgttgatgaaagatgcaacgcagaaaacgccgcacgaaagtgcggcgttttcacatataatgcgccacttttagaatgaaaaagttgcaaaaactcgatttttcaaaatttcagttttgccccgcgagaggcgacatttttaagatgcaccctgccgaatttatggtttggtgtggttcgaacaccgaggcttaaaaaagaataaaggataagaaggcaggccaccgttcgattccttatgagggagcggacggtggcctttttcgtctcattggtgcttatgttgctttcgcttcgtttgtctatcattccttggtagtgttggtaatagctttcactgaatctttcaggtatgcttgcgttacaaaaagacgaaggaggtatccgagaatggcaatcaccaaaaacttgtgcgctcagctccccatcgacctgcatgagcgggtcagcgaagaacgggaacggctgggccagaccaccagtgagtacatcacaaatctcatccaagaatactacgacatgatcgaaaaccagaagggcggcattcaaatgactgaaaaaggcagaacgatggcattccagatccccgaagaactcttccagcgcatcaagcgtcacctggagcgcgaaacactccgcagcggcaaaaagctcacccagcgggatttcgtgctaaacctgatcacgcaggcgctggacgaagcggacgccgagaacactgcggagcagaacgcccctcactgagacccctgtcgcgccccatgtggccgacgtgaccactccagcggacacggacacccccaacgaagataacgccgtgtaagcctgcaaacgccgaagttaaaaacgaatcatacatggagaaagccgccctgggcatctgagatcatcagatgcccagggcggctttttgcgtttcatcaaagaaagaaggaggcacacatcacagcaagcgagatcagaaatcgcttcacagacacagaaatgcagatcgccagagaaacagacctgccggagctgctctcccacctcggctatcaagtcaagcgcgtggggcgcttccatactaccgcggagatggacagcctgcggatcaaggatcggtgcacctggttccggtattcccagaataccggcggggatgccatcaccttcctccagcagtattgcggaaaatccttttcggaagcggtggagtacctgctgaccttccacgggaaagccagagacacacccgctccgcagccaaagcccatcagccggaagcaggagttttccctgccgccccgcaatgcggatgacagaagggtcttcgcctatctccgtaagcgggatatcgctgcccaggtgatccggcagtttctgaatgccggtctgctgtatgaggatgcggtacatcacaactgcgtgttcgttggaaagaacagcgcagggcaggcaaagtatgcggaactgcgcggcacctatgatctggacggtcccggatttaagggagacgcacccggcagtgacaaaaacacgggattctccctcccgcacgatccgcggtcagatctggtgcttgtctttgaggcacccatcgatctgatgagttacctcacgctccacagagacatggtcaacgccgtagcgctgtgcgggctctatgacggcgcactgcggacctatttgcaggcgcatccggagatccgccgtattgcgctgtgtctggacgcggacgagcctgggcagaaagccgctcggcaattacaggaaaagtatcaattacaggggtatgccgttgccgtggagaaaccgcgctgcggcaaggattggaacgagtatctgcaaagaaagatttgcagtcggggaagggggcgatagccaaaagaacattgttttcaacgcggaaaaaagcaaaaaatataaggaggccctatgaatctgaaacagaaccattattcccgcagagcgctggcactgctgctgacgctggtcatgtgtgtgggtatgatccccaccgcctttgccgcccagcagaacagctaccacgaccccgccgagcactggatggagcatgacgctgatgtttttggagcagtgggatgccgttcgaaattcttccgatgacttatccaaataccgtcccacgttgtccgttccttcggatggatatgttcagccctattgcgactcacctctggatgatgaatacttaggagaaaatgtctacctaaacatgatcaacggtgcgaaacggtatgtctatatcacaacgccctatttgatcgtagacagtgaaatgaagactgccctgtgcttggccgcgaaacggggagttgatgtgcagatcatcacgcccggcattccggacaagaaaatcgtatgggatctgactcgttcctattatccggaattactgtcagcaggcgtccacatctatgaatacacacctgggtttatccactccaagctctgtatctgcgacgatgaagcagcggtgaccggtacgataaactttgactatcgaagcctgtatctccattttgaaaatgcctgtctgttcatctataacgcggttgtcctccaggcaaagatgactttttgcgtacgcaggaaaaatccgcgcagatcctccttgaagatatgggggatctcaaaaagtattgaagtctgctccgcagtatctattacgcagtcctgcggctatttgcaccgcttttgtaaaaagaaatcacttgggacactcaagcaaaaaatgtctattttcatttgcgaagccattttcagcagcacagattaacaaagtcgtccatgtcctcactaccataaaaggaatggacgactttgttgcctgttccgttagctgctttggggaacctctctctacagccttaggcccttgatatccttgatgcgggacaaaatgatgttgcagctgcagctgaccacgccgggcagcgggtcgatgacctcccggatcagcttctccatctcctcactggaggcggccaccgcgtggacgtggagcttattcttccccgtcacgcggtaaacctgcgtaatggcctcgttctccttcagcgtttccgtcacctctgccagcgtgtccggcagtgtttcaatctcaaaatagcaggaaaccgcgccgctgatcttctgaggattgatgatggtggtatattcctcaatgatcccccgctgctccagtgcctggatacgggcttttaccgccacccgggatatccctacttcctgcccgatgtcggaataagatatccgagcattttcaatcagcagccggacgatcttctggtccagcgcgtccaatccttccagaaacatggcaaggctcctctctcatgtgtgatttttcagtgacatcataccacatatcatacaaaaagtaaataaaggattgactttagcaggttatatcagtataattatttcaaaacgtaagttataactttctatttggacgtgaggaaatgaacaaaggcctgacccaggggccggtgatgcgctccatgttgctgttcgcagtccccatgattttgggaaacctgctgcagcagtgctacaatgtggcggacacattgatcgtggggcagtttctggggaaaaacgccctggctgccgtcggctcatcgtttacattgatgacctttctgacttctatcctgctgggcctctgcatgggcagtggggcactgttctccatccggtttgggcagagggacgaagctggcctgcgggagagcgtgtgcgcttcctttgtgttgattgcggcgtcggcgcttttgctgaacgtgcttgctttcgcatgtctggacttcctacggggctttctccgggtgccggcggaggtgtggggcctgatgcgggagtatttggtcatcatcttctgcggcatcgccgccaccttcctgtacaattatttcgcgtcgttcctgcgggcggtgggcaattccgtggtgccgctgatctttctggcggtctccgccgtgctgaacatccttctggatctgtggtttgtgctgggactggaacgaggtgtggccggagcggcagaggcaacggtgattgcccagtatgtctccggcgttggcattgcggtctacgctttggcgcggtgtccccagcttcgggccattcacaaaggttgccggattcgctgggcctgcgtccgggagatcgccggtttttccatcctgacctgtgtccaacagtccgtcatgaacctgggtatctgatggtgcagggactggtcaacagctttgggcccacagtcatggcagcgttcgcggcggcggtgaagatcgacgccttcgcctatatgcccgtacaggacttcggcaacgccttttccaccttcattgcccaaaattacggcgcccagaaagaagcccgcatccgcgccggactgaaaggggctgtgggcgcttccatgcttttttgtgtggtggtatccgccttggtgtgggcctttgcccgcccgttgatggcgctattcgtggaagcgggagaaactgaaatcatcctggagggcgtccgctatctgcgcatcgagggtgccttttactgcgggatcggctgcctgttcctgctgtacggcctatacagggcgctgggtaaaccagggatgagcgtggtgctcaccgttatatcactcggcacccgggtagcgctggcctacgcgctggcggcagtgccgtccatcggcgtgaccggcatctggtggtcagtgcccatcggttggctgctggcggacacggtaggtattctctattacatattccgaaaaaagaggctgttttcttgggaaaaccaagcacaaatataaatcatatttaggaggtacatcgccacatgaaagtcgtactgttggagggactgggtgtgtccgagcaggtgatcgagcagcacgcccggaagctggagtccatgggccacaccttcgtggcttatccgaagaacacggaccccctggtccaggcggaatggagccgtgacgcggatgtcatcatgctggccaatatgcccctggcccctgtcgtgctggaggaagcaaagaacctgaagttcatcgacgtggcctttaccggcgtggaccacatccccatggcggaggcgaagcagcgtggcatcgccgtcagcaacgcctccggctatgccacccaggccgtggcggagctgtgcgtcagcttcatgatccagctgctgcggaatgtaggcaagacggaggaacgctgccggaacggcggcaccaaggacggcctggtgggcaacctgctgtgcgggaagaccgtgggcatcgtgggtgccggtgccatcggcaagaaggtggctgccctctgcaaggccttcggctgctctgtgctggcctacaaccgaagcaccgtctccgaccccgccatcgatgagcaggtgtctttggaggaactgctgaagcgctcggacattgtgtccctgcattgccctctgacggcggataccaagggcatgatcggaaaggatcagctggctctcatgaagaagagcgccctcctcatcaacaccgcccgtggcggcgtgctggattccgctgccctggctgatgcgctggaaaagggtgagatcgccggcgcggcatgtgatgtctttgagacggagccgcccctgcccaccgaccatcccctgctgcactgccccaacaccatcgtcacccctcacatcgccttcgcctccgtggagtccatggagcagcgggcagacatcgtgttcaacaacctctattcctggctggacggaaagcaagtcaacgcggtctgacacggataaggaaaaatcgccatgactaaagtgagaatcatttgtggtggagagcagttttcggctgttctggaagaagagcttgctcctaaaacctgcgccattttcaaaaaaatgctccccatcaaaaaccagatcatccatgtccgctggagcggcgagggaatgtggatccccatgggcgatacccggtgggaaggacttacatacgagaaccataccagctatcccaccaagggggaaatgctgatctatcccggtggcatcagtgagatggagatgatcctggcctatggcagcgtccacttcgccagcaaggtggggcaactggcgggaaaccatttcctcaccatcacagatgggctggatcggctctactcgctggggcgcaaatgcctgtacgaaggggcacagccgatcacgattgaattggaggcagctttttaatataactgatggccttcaagagctgcgccgctaaacattatatttaaaccttggtaaaagtattgattacaaaagcagagaaatagtataaacaaacagagccgcagccatgactcctcctagagtaatggctgcggctctgtttcatttatctactattgaatcggatagctcatacccggcagtgcaaatggagtcaacgatatgttccattgtgctttcaaaatcaatttccaattgaactgcctccaatctgcgcaagtatgtgcataaattcgggatcaagatgcactgtgaatacatcctcaatggatgcgttaaaaacttgcgcaatcttccatgccagagaaagagaatgattatattttccattctccaaattataaatggtctcccggcgcacatcgaacagcttggcgagttctgtctgggtcatattccggtcattgcggtaattcttaattcggtattcaatcatttccacacccccgcgtcgttatcggctgcttgcgcagaaaagtgtggtacatttcgctctatatataaattataccacagttacaggaggaaatgacacaatgagaaaacgaatactaaccgcttgccgtctatcggtatcgccgcatacaggatagcacagaagttggcaaaatacaacattattataggacggggctgggaatggaaaatgaaatagtacatatgccagagcagattcaggaactgacacttttgctgatgtacctgacttcgtggcaggaacgcagaacaataggacttcgcagaaaaccgcacaagactgatgatatgctgctgcggcgctgctggaagggatatgatttttcggttctggaaaggttggaagcacaggggcttatctgcggtgaaggcggcaaaaagccgatcgtgtttacagacgaaggagagcggcttgccatagaactcatgaaaaagtatgggctcggagatcgtaaagaggatgaggtttaacggtgggtatttctcttgcgcataaggctgcaaaaccgcaaaaccattgcggcacaaggctttgacggtggtatcttttctgtcgacacacgacaaaaaccgtctcaaacgatacgtttgaggcggtcagcttgtcgagaaacccggttgcacattacgcagcaaccgggtttctcgacaagctgtgaggagtcttgaaaactgtacgttttcaagactcctcaagatcattccaactcaaatgcgccggtataaagctgataataatgtcgcttgccttaatgatttccagctttgtgtttgaaataatctgattgtcggtcattctttgattctccttttcgattgatagtgcgggcattgaataacgatggcacggaagctctgcttgcagctcctttcgcattttctgcaaagctcgttatatttcatccgtccacgctcgtcaagaaagaacgcccattcttccttgaggtatttcgacatacggggcatagcgtccacctcctttttgcactacctatttgccgatttgctcccgaaacgcaaaaacgcctgaaaccgtatcccactgtatgttttcggggcgattttgggcgtttgctttcgatatgagcggctttcaaaacggtggcggtatccttaccgtccgtcattcaaaagccgctgtttgtcgcttccgggtaacaaaaaagcgccgtattgctacgacgcttttgtcttgctcggaagatggagcaaggaaacgctattccattatttgttatgctttttctttctgctggcaaccgttataccaatggcagcaccgccgctgacaatcagcagcgcaaaccacaatgcggggttggcggtgtcgccggtgcgcagaatcggggaaacaggctgcaccgtcggctggggctgcaccgtcggcgtcggctgcggggtcacagtgggctgtggggttgccgtttcagccggctttgccttgacggtgaacttagctgttgccgtaccgtgttgagaaacaatcgcaagcgtatgctcgcccacggaaagcgcggcaacaaaatcacggttcagcgtgatgatggtgctgccctctctcttcgcatagttcttttcatccagcgcagtgccatcaagctctacacgaacaaaatcggcaaaggatgcatcagaagtgaaggacagttcctttttctcgccctgcgtgaccgctgcaccatccccggctgtgattttcgggggcagctttgccgtcacggtggcagccttggtgatttcctttattgccgcagcatcggagaaatacttcttgcagccgccgcagtaccaatacgcaatgttgccttcttcggcagcggtggcggcctttgcgtcaatgtgtttcaggtcggtgtggttgttcgggtcaaggctgccgtagcttgccttgcaaatctcacagacggcattttgggtgcaggtcgctttgccgccggagtgctccgcgtagccgttcttttccgcgttatccgtcacatcgcagctttcattggcacactcatgccagtgatgcgttgcatcggacgtccaatcggacttccagctgtggccggtggcatcgattggctccgtctttgtcgcgccgcacttggtgcagctatatgtctcttcgcccgcttttgtgcaggtaggcgctgttgttatcgtaccgttgtcccaagtatgagggcttacgtcatcctttatatcgcaacgggaacactgcttccagtgctcgttatcatcatgtgtccaactggtagtaaaatcatgtcccagagcatcgccatattccgcaccgcaaactgtgcatgttgctctttgggtgcaggtggccgtgccgccgtggcaattctcggtttccgtatggctggtgtcacgcttacagattcgggtgtgggtcttttcatcgctgttttgcgtccaagcgccccagtcgtggtccagcgcggtattcgctgcggtaaacgtatcggcgtcgttggtgcttacttctccgcacgcacaggatagataatacaccgcgttattggtgcagtccgcaggagttttcagcgcttcgggcttttgaacctgctgtgtgtaggcgtgcacatggatcggcgtccagtgggcgtagagcgtatgcgccgctcgggaggacataattgtggtttcctccaccttcgtgccgccgtccttctcggtgaaccagccgtcgaagcggtagttgacgcgcgtcggcgtcggcagcgcgccgtaagcatcgccgggaaaaaccgatttgctgctcatctcgccttcgctcagcgtaccgccgttggggtcgaaggtcacggtatgtgcagtcagggtctcttccacggtgagaaccagcgtcgcagatacggagaacttattcaccgctgtccgcgtgaaggtcagcgtataggttccggacggcaaatcggtgatggtgagcctgagatccttccaatccacgttacggtcgacgtgtacatgatcgtcgggaatcccgccgtagtcccatgttatcgaactatcggaacctgggaaattcatggcgggctggatggaataagtagctacatccaggatgactgtttcgccccttaacgctgtgagcttgtatttatcagcctcatccgtggctgcttttacgccgtcgcctgtaatctcaatgtatgtaaacggcgaatacagcacccgaacctccgagatggaggaaccactcgccgctgcacggctgatccattgaaggtcttcggtcacgtaataagctgagttgctgtttactctgaacagcagatcgccgaccgttccgccttcggtacggttggtgatttttccgtaggtgccggtcttgctgcctctgagcgtcgtgctgctgtacgcgttgagattcgtgatctttccgtcgttccagatcgtgacgtcatagtctccaacgttcatatacgtgatgtatttcccctcagccaaacgaactgttccggctttattgatggataccgtgcggtcaaagcttctgaggaaatggatctcttcggaggtttcgctgctgttaaaatctgctattgcatcatcatgtgcaaagaagcgtttttcataagggtcgacggaatgcagcacttttgcagccacgatttgaccgcaaagcgcgcagtaatcagggtcttcgcccttcgagctgtcgcccagaacgtgtggttccgtcgtgaaaatatccgggtggcaggagggatataccttatgatttcttttgccttcaagattgtacggcacgtagaccgtatcgcctacatgcttgtttctgtcgtagcgcatgacggaggacgatccggtcggattcaaacccgtcgcatcaaggaaatagccgttacacttcccgcatctccagtgctccacccagccgtcgtgctggcagttcgcgtcctgcgcctcataacgcgtcaggctgtggccggaagccgggatcgtgacaccagaaatgtcgtttgcaagtttattcgtgcagttctcatcggagaagatctgcttgcagccctggcattcccagcaggtctgcgatatcccggattcggtgcaggtcgcgtccttcttgtcgatcttctcggcatacccgatcttatcgcgggtcagcgtgaacgtaatggaatcgtctcggccggtgagcagcttgcgtgccgtcaccgacgcgttgaacggcgcgtggcaggaatctgcatcccggaacgtcaagctgagtgcgttgttcgcaatcttggtgcctgaaacaccgcaggtgctgcatttgaatgacacttcaaacaggacagtcagaggtctcgtctcagacgtatcccattcggaagagtccacgttcttgatggaaatggacgttacttcgccggtgtgcccctctgtgccgcagaaatagctgtcggcggagagtgtcacattgacggtatatccgaccgacgtatctgacgccgcatatgcgggaagggcgaacagtaccactgcgcaaagcacaagcagcaccgctaggaattttttcttcatgcaagttcctcgctttcttctcgcgcacctcccgtcccccatggggagcgcgttttggagcaaaagggaattgcatcgggatatatcccgatgcaagggagtactcccttgcaatacatattggcttctatttttgtgctggcagcgtgatccccgcgagggaaaactcaaagcgcatcgccagcgcacgaaacagcgcctgcatcacctgttcggagatcgtgcggatatccagcccttccacgaaccggatcgcctgttccgtttcctccttcgggacgttgtacgcccgcagactcatggtgagaaacagccgcagcttcttttccagcgtcagctcctcgtcgcaggggtgggccatgtagccgcgcatgatgctggctgagccgatctccatgtcataaaaatcgcgggcagtcagctccggctgatacggaccgaagatctgatacagctccttcgccgtttcccggaagataaattcagacgcttccttctgcgtgtaggcttcaatgtagatttcccgcaggttttcgttcagctccgtcagcgtcatctggatcgccgtttccaccgcataggcgtaaaccggcggcagcttgctgtctgcaatgcttcttgccacgccgaactgtccgccgaacatcgtttcggtcaattccagcaaaattctgtccttggtaggaaatagattcaaatagcttccccttgccacacctgcctcgtccacaatctgactgacagtggtgtttttatacccctgctccaaaaagagacggacacacacggtcagtattttcctctttgtttcgctgctgtctctccgcaaatatatcacctctctccaaacgtattggtacgcatactaataatatcatatcaagtgcaaaaaggcaagtggaatttgaaactttacctccgtaaattgtgacattttcacaaacgccgccttcttccattactcacggaactttatgacttcttgaatactacccgcaaaggaaaagccgccgtcgcttgacagcagcctttccgatagcttgttatgcgtaaatcaaatcgcttgaaacaatttccctaacctcctttcggcatcaacgcctttagctgtttccgcagctccgatagcatccatcttctcaccccctttctttgggggatgttggtggttctctccctttccgctaacaagactttggcaaagccgccagctacccgctaaagacctcctttttgaaaatttctcaaagaattttttcggccagggacagcggctaaaatgcgacaaaaatcgcccggcaggtcgtaaacctaccgggcgacgatttgaagcgttttgttgttttcttacatggtatagttcatactcatagccggaatattcccgtggcggggcaaggctttttttaagcggtagaagtggattagattataatgatagtaaaacagcatggcggcgtcctcccgtgggccgccatgtctttaactgctgggaatgacagaaagaaagcagcggccttgatttctcaaaaccgccaccagtgaatataaattaagtgtgaaaatgggtctgcccagcagcggtttttttcttttctgccgctgggcagatgttttttctttagatacatgataagaggaatttttgaagattccataaagatttgaaaaatggacggacataaaagacgtccattacactatcggaaaatcagcaaggaagtttcatagtaacctttgcgccgccggtttcttttgaattttctaaaataagctgaccattatgttgttccataatcgaatttgtaatatatagacccataccaaagtgtaactttgaattgcggctttgatcgcccatatagaaccgttcctgtgcgtggcataatgcctctttagaaaaccccgttccctcgtctgtgactgaaatttccacgaaaccgttgttactctgaacatccacataaagcgttccgccttgcggggagtagtccagcccattactgataacattcataatagcacgttctatcagcaccctatcaaatttcagcatttgagggagtgaaacagtattcatttgcagccggatttcttttgtccggcatagtgattccatataaccgaacaagtgctgcatgaacgctggcaagtctatactttcaatatggagctgataaccaaccgccgcccgtgatatatcaatcagggtttgaatatatgactgcatctggccggagctttccacgacgtaaccagcgtataatcgttgctcatcatcaagatttgtttctgtgagtaaatcagcatttccttgaataaccgtcagaggcgttttcaaatcatgggcaagcgcggcgatttgctctttctgtgtctgttcggttttccattgccgttctaacgaaattttcagattatctttcatatctgaaaaagatgcaaggacatcttcaaactctttgattttggcgtgtcctacttcaaaatcaaggttttgctttgaaacctccgcagttgcttcaaaaagcggggtcagttgtgtacgcaggttcttagcaaatctggcggtcagtatgataatgaccagcagcgaatttacagccatcaggataagcgcaagcgtgtcaggagatggaaaatattccggtagccatgacactgtaaattgagaaccaatataataccttaaaacgcaaaattcgttttcccggacaacaagtgcaaactgcctccccgtagcatattcaatatattctccctttgcgtacagcagggcaatttctttttcatcatcgtccatattgctgtaaagctcattaaagttcttgtccagaattaagtagccgcatccctgtggaatcacaacctttgtaatatccggggcaatcgtcagcgttggaatgatctcttttacctgcaattcacttagatttgctcttgtagctaatccagcatttacagcaagtccctccaaaccagaagggacaataattgccgctaccagcatgacaatgagggagatagcaaactggcgaaacaatattttcaatgtaggtttctttttcactcccatttatatcctatcccccatacggtgctgatcggacttattttgaaatgctccaatttcgcacgaatattttttatatgcgttgagatcgtagagttatcgcctattccatcaaacccgaaaacggcttcatagatttgttcttttgtaaaaacctgtccccggtttttcgcaaggtattcacagattgaatactcgcttttggtaaggggaaccggctgttctgaaacatacagtacctttgcggaaaggtcaaatcttatatcaggcccaaatgaaagtgtgctgtgatgctcccttttttctctgcgtaaatgtgccgcgacacgggcgcgaagctcctgaatacgaaaaggtttcgtaatataatcatccgcaccgatgcccaatccaaacaatatatcttcctctaatgtctttgcggtcagaaagagaatcgggcagtctaccatattcctgatctgtttgcaaaactcaaacccgtctgtgccaggcatcatcacatccaaaagaatgaggtcatagaaatgcagctttttgatgtctacatcatccgcattttgacagactgttatcaaatatccatctttccccaaactgttcttaatcaattccaagatagaaacttcatcgtcaactacaagtaagtgggtcaaaaaatcacctcccgccccattataccacattgtcaaggttactcatcattatttttaatgtcagctttccgatattcattgttgatatttacagctacggcattgcttatatccacatccacaatactgtaaacgtagccgaaactgaaatcttcccccgccacatttttgaagcgtttcgatacctgcccgatttcttcttgcagttctgacatttcaagacattcatccgttatggtatatgtcaggccgttatatgaaatttcatcatagtttgcggcgttcagctcataatacggcagagattcatttaacgccttatttttatcggcggtatcacggagcgcaccgcaggccgataagcatataagacttacaagcacaattaccacggcaaacaggcactttttattcactgtttttacctccctcccaaccatgaaaccaaaccaaactggcaatcagcagacaaacagtgcagcatacagaaataatcataccgctgaaaaaatcggtttttacctgtgcatacagttgggggctatcccatgcaagcacagtgtaatccatagcacgaacgccccaggcccagggaatatatttccatgtagcgtcaccaagccctgttatcataagggcagctattaaacttcctgcaattcccaatcccatagatgcaccttttccgaagctcattcccacaaacaaatgaatcaggtaaatgggaagcatggtaatcaacaatagaatccctgctttcaggtaaaggcttgccggagcatccctatatagtgcagcgaatgttcctaacgctaaaaatgttgcgccaaaagcacagatcatcagaaaaccaagtttaccaatatacgttgccatgcgagatgggattgttcccaacaaaagctgataatgcccggcctgattttcgatctgaacaaccaggcccacaataatgccgatcagaaacgggaacgcaacggccagcacttccagataggcactgattttggttgccagttcccatctggatatatgatagtaacccgcaaaaatcgccgcacatataatcggaatcatgctgtgcatatagagcaaaatgctatgtttacacttctgatattctgctttccagcagcgaaccacagataccatagttaccccacctcctttttctcaaaccatcttgcagttaaaaatgacagcgccgcaaaccaggccagcgaaatgaccaatacaagtataatcatccaaaatgccattgccgtactctgatctgcaaccggctcaccattaggcaaaatacctaacacggaaatcataagatgcggcacccagctatacgggcagatcatccacaaagaggttgtagccgtgaaaatccctaaaacgcttccaagtccggcattaagaataaccgtgacaaagataccaactttttttgataaccataagcacagcggaacttcccataggcttgcaatgacaatacaagctgttccggccgcagcctgccaaattccgattgtcaggggaatttcgttgataactaatattgcaaaaccgcccaacagatttaacgccaggaaaatgaaattccccacgcaggagtaaataccggacactccaatttttgctttccagactttgttctgcgaaacaggcaatgaagcaacggcacgatattttagtttgccattatcccgctgttcaaccaaagcgcaggtaagcgtgagaaagccgggatagagcagtatataccaccagttataagaattgagctggaaccaaagaggggcaaaaaagttcataagcgcagttacaaacggggccagaacgatcagcgtttttgtgaaagttctcttatgttttagattctcggcctgaatatatctcatttccatttaatacccctcctttccattcctgcgaataacatccataaagagatgttccaaatcttcaccagcgcgaagctctccctcatatccaaggacgccgccagcaatgatacccacatgatctgcaatctgctggacttctgacagaatatggctggacaaaataactgtaatccctttgcagggaaaagagcgaattaactctcgaagttcctcaatccctaaagggtcaaggccgttagtcggttcatccagaatcaaaagctggggactgttcagcaatgcaatagcaataccaagccgctgcttcataccaagagaaaactgcccggcccgtttcttgccggtattcgtgagctggacaatttgcaatacctcgttaattcgtgcatcgtccaggccgagcaatgtagttctgactttgagattttcgtatgcagtcagattttcgtaaagcgggggcatctcaatcaaagcaccgatatgctccagatcattccgcttccacgggtggccgtcaaactcgatgcttcccgatgtggggcgcaaaatgccggtgagcatttttaagatcgtggatttgccagccccattcggccccagcagaccataaaccgagttgcgccggatgttcagtgacacattgtttaccgccatttgccccttgaaatttttgcagaggtcagtcgttttcaaaatcatatccatataatcaagtcctttctttgattttacggatagcataccgggcaattttgaagatttcataaagattcccgaaaacagaatatgaacaatgcaccgtaaccgtggagcatatcgcaacaaagcaccaatctactcatttagggccttaaaaagccctacctgatccgctatccggaggatggccgtctggggctgagcaacgaccgcgctgagcacagcataaagccatttgcgatgggacgagggaactgattattcgccaatacgccagacggcgcctgggccagtgccgtaatgtatagtctgattgaacaacaagggaaaacggtctggatccgtaccgatatcttttgtgggggttgcaaagcgcacccaagttgagcgagatggacacaacatgggaggaacacctcacgccgtccacgcactggataaatgcaggatgtcaaaagattaaagagagctggctcgtgccagctctcttatactgtgcgctgtcaggttctacggttactatcaaagtgcattgacggttcctgatttctcaaatattctgtttcaggcaggtcttaatgtcatcctcagcattggtaataagccgcaagtcgaaggtgtccactaaatactgaagcacattcgggctcaaaaatgccggcagggtagggcctaaatatatgcctttaattcccagactcaataatgccagcaaatcagcaacagccttttgttcgtaccatgatacgatcaacgacaagggcaatccgtttacatcggtaccaaaagcatctgctaaacctgttgcgatccgtatggcagaatatacatcattgcattgcccgacatccaaaagtctcggcagacccgctacttcaccgaaatccagtttgttaaatctgtattttccgcatgcgagcgttaatatcacgcagtctttcgggaccatcttagcaaactctgtataatagtttcgaccgggtcttgctccgtcacagccgccaataagaaagaaatgtctgatttttcctgcttttactgccgctacgattttgtcagaatcgcttaataccgaatgatgcccgaatccgacaagtatctcgtggggctcctgatcctccggatagccgcccaattctattgcctgctgaatgatttcactgaaatccttttcaccgttttctcttttcccaatgtgttttaccccttcccagcccactacattcgtgctgtagattcggcctttatagctctctctcggccgcataaggcaattcgtcgtcattagaatacatcccggaagatcatcaaattgtttttgttgatcttgccacgcaccaccgaaattcccgacaaggtgggggtatttttttaatccctcatatccgtggcacggcagcatttcaccgtgtgtatacacattgacccccgttccctttgtttgttccagcagcatttccaaatccttcaaatcatgtcccgaaacaacgataaagggtcctttcctcatatggatattgaccctatggggtgccggatttccgtaaactgcagtattggcttcatccaattttttcataacctcaattgccgcttctccggtgcgcatggtcattcggatcagttcttccactgtaaggttatcgtctgtgagagcttccaatgcctgaatataaaattcatctacctcatcactgtaatagcccagttctcttgcctgatgcccataggcgctgatacctttcagtccgtataaaatggtttgtctcaatgagcgaatatccgggtcaagggatttatcatacataattcccgcgaattgagcatcctttagcatttgtgtttttgtttcgggaagatcataagtggcgtatgatgtctgattgtgaagctctcctgtgattgttctcaaattttcttttatccgttgtgattcgttcaataattccacgtgtactttcgaatcaaaattaacattcgtcagcgttgtgaaaagaacattttcgataaaccgtatgatatttttatcgatatgctgtccctcatcttgcagaacttttccgtaacagctgatccctttgatttgaaagatcagcaaatcctgcagattggcgatttctggtgtctttccgcaaaccccaagctttgtgcagccctttccgttcgctgtttgctcacattgatagcaaaatatttcgtatcctaaatccatattattcatatgctgaccatccttatctttcgtttttatagttaaagtatcggtcaggaaacgaaaaatatacttggtatgagagaccttactaatttgcttatgtgtgataaagaagtaatagaagtgtaaaaatttttgcctttcctatccgatacttgcctttgatatcggatagggcgggcggtcattcgggcaagtccactttgccgacgaaagaatagtaaatctcaatatcctgtctgcgtgtgccgttttcatcgtagctgcactcatgcacaacgattttctctacaaactcacgcaagagggtgtgagtcagttcttcaaagttcatgtgcttgcggacaatgttcataaacttttctgcgtttacggtagcttcctgtgctttggaaagctccgcctgtattctggcaacacgctctttcaattcctgctgttcggcttcacagtctgccgaaagctccgtgaaacgctcgtcagaaatgcgaccgcttacgctgtcctcatacagccgcttgaaaatagcggaaagttcgctgatacgcttttcagccgcttccagttcctttttccttgcggcattcctgcgcttgcccccgtcctcgttctgctcgattaacagcttcataaagcgggcttcatgcttcgccgcatacaccgagcagaagaagcttgccgcagcagtcaacaagatcggcgcaaatatcaataacatctgccgtagaatcaactcgacgggacacttctatcaggatgatattgatgagctgaaagagaagctggatttggtatggcagtcactaaaatcaaagcaatccgaggaactttgagcaaggctctcgcgtacatttcaaaccccgataagaccgaggacaagctgctgatctccacctacgggtgcgcatcggaaacggcggcacaagagtttgaatggacgcgaaggatagccgagcaaaaaggaatgaagcccgtcaggatcatagcccgtcatgtgatccagtccttcgatgtcggtgaggtaacgccggagcttgcccatgaaatcggcaagcagtttgctgatgaaatcctcggcggaaagtacgaatatgtgctgaccacccacacggataaaaaccatgtgcataaccacctgattttcaatgccgtggacttcgttgatcatcacgcctataagagctacaagaaaatctactacgatatgcgcgaggtcagcgaccggctctgcaaagaaaatgggctttccgtgattccaccctcacagaacaaggggatgggctacaaggaatacaccgaagccaaacgcggcacaagttggaagcagaagctcaaacagaccattgaccggtttgtcatcgtggcaaaggactacgacgagtttttgaagctcatgcaggaagccggttataagatcaaaaccggtaaatacatttccttccgtgccgaaggtcaggagcgtttcacccgctccaaaaccattggtgagaactacaccgaagagaggatcaaggaacgtagtaactatcactctctaagtcttattttcttccgattcccggacttcttggattccgaaaatcggctttctgcgtgaactcctttaagtagatgcggttggccctgccctgtccctgacggcgacgctcgatgaggtcggctgcttccagctctgcaaacagacggcagaccttttcgtggccgaagtgcagtagctcctgcgcctgacggatggtgaaatattggtagacccggccacgctcgtctttccagccgtttttctcggacagggataggcggtccagcagcagaccgtagagcatcttggcgtcggtggagactggccggtatcgctcatcggtgaatagcaacttgggtatacggtagaacctgaacttttccgtgtccggcgctgtaaaatatgggttcattgaatttctcctctcgcttgaatttgtcacgcttttcaaagcgtatttttgaggttaaggtgttgctggattgcttgggtagatttgaattcaaaaagccttgtgtttcagggctgtccgcaccttaaaagcgtgacgctgatgcccgctttcggcgctgccgttcggttgccttcaaccgtttctgcttggcggcgcaggccggacaataacgctgattctttgccctcggtgcaaaaggctgatggcacagcacacagcgcttgccgccggatggcttcattacctcggcatataatctttcgtctgtcgggagcacagcattcttgaagtagttgcagtagaggccgtacttgctgatgctctggacgcagacacagggctcgccgtcgtccagcagcaggcagttgccgccgtcatagttggcgcacagcttccgcagcagggcgttgactcttttcgcctgctgcggtgtgattttgatgaccattggaaaaacctcctctcacttgttactaaaatgggtaggtgtttggtgaccctcttctccaaaatttctgctatttaattttcaaggtgcacacggaaaaccacagagcggcgacaagcggtggaaccagctaccgtcctctcacttttcctttgccgaattttcctgcaaaattcccgcactttttcaaaaattcacctctttcaaggcacaagagaagaatctcctcaatagatagccagcgagaaggctgattttttaaccccctactaaccaactgggaaatctttctcgatttgtacgaagttatttttcaaatttttcttaaagatgcaaaagaggcacagccaacggatcaatccgaaggctgtacctctgtattttggtattctcttttctccaaatggtgttgagaaaatgataggtttatggtataatgctgttaatcttctggaaggagaactgtttgatgacgcctttaagtgagttaatacaggtcatgcgcaagaaagccctgctgtcacagaaagattttgcaaaagcgctgaatgtatccgttggaacgataaaccgttgggaaaacgccaaaaccaagccgaatatcacggcaatgaaaaaaatcaaggcattttgtgaagaaaacgacatcccctttgatgaaatcgaagcggcgtggatcgcccagaaggagtaaatgcaatggctgatgtaaagaaagaccaggagcgggacgagctattccgccgtatctataaaatcgccaccgaccttgttcacgcaggccatgtggcggagtgggatttcaaatcttatgtgctcggcacgatgttctaccgctatatttccgagaacttcgcggcctatatcaatgagggcgagcacgctgccggaaataccgatttcgactacgccaaaatgtcggacgccgaggcggagactgcccgtgagggactggtgcaggaaaagggctttttcattctgccctcggagctgttctgcaatgttctcgcccgtgccgataaggatgacaacctgaacgagacgctggagcgtgtgttcaaccacattgagagcagcgccgccagcggagatgctgagaatgattttgcaggtctgtttgacgatttcgatgtgaacagcaaggccatcggcgagacgattgccaagcggaataaagtcctggtagagctgctgaacggtgtggcacagatgccgctgttctccacggagggcagcaacccggacctgttcggcgatgcgtatgagtatctgatgggaatgtacgccgccaatgcaggtaaaaaaggcggtcagtatttcactcccgccgatgtttcggagctgctggcccgcctcggcaccatcggcaaaacgaaaatcaataaggtctatgaccccgcctgcggctccggttctctgctgctgaaggtggaaaaagtgctgggcaaggataatatcgagcgaggcttctacggtcaggagattgacctgaccacttacaacctctgccgcatcaatatgttcctgcataacatcgagttcgataagttcagcattgtacgggaggacaccctgctcagcccgcagcactgggatgaccagccctttgagctgatcgtctccaatccgccgttttccgtgccgtgggagggtgacaaaaatgtgacgctgatcaacgacccccggtttgcccctgccggtgtgctggcgcctgcctctaagggggatatggcgtttattatgcacagcctttcgtggctggcgaataacggtgcagcggccatcgtttgcttccccggcattatgtaccgtggcggggccgaacagaagatccgcaagtatctggtggataacaactttgtggacgctatcattcagctgccctccaacctgttcttaaatgttacaatctctgtggatattatgctgctgaaaaagaacaagacggacaacgccgttctgtttgtggatgcctccaaggagtttgtgaaggttacgaagaacaaccggctttccgaggacaacatccggcgcatcgtgtccgccgtggcagaacgcaaggatgagccgcattttgcccgccttgtgccaaacgacgaagttggcagcaagcagaataattacaatctctccgtttccacctatgtggagcaggaggacacccgggaaaagattgacattgtgaagttgaatgcagaaattgcggaaatcgtcgcacgggaacagaaattgagagaggaaattgataaaatcgttgctgaaattagcaatgagcaatgagcaattagtaattggagggatgattatggctaagattgaaaaagatcgtccattgccttcacatacgaaattggattatgatgaatgttacgccaaaattgtcttagagaaattctttcctgatcaatacgaaaatttgcagatttcggataaaccggatttgcgggatatctctaacaatattgggatagaagttacttcggcgattccgcaaagtgagcaagaagcgatggcgcttgcttgtgaaattccgtaccttgaaaaagaaaaacaggataaacgaattgcctacttgaaaaagaaaggatacaactatacccaatatggaatgaccggcccgggtatgggctatgcttggacgggtttagactatccggatataagaaacacatggtgcaaatattttctctcggctgttgaaacaaaaatgaagaaacttaatactggcggatatgcatcgatgaaacgatatgatttattcgtaaattccgaattgttcattgacgactggatgccggatgaattgttaaaagtcttaatcacatatagtcagcgacctattaactactcgtttatctatttactctcattagatggattgtttgtttttaatttagaaaaacaaacagtgtcgcctgttgagacaggtgaaaaactgtacggattgggtatgctggcacgaaaaatggtggaagaaggtgaagaagatgactaaacttgataaattgattcaggaactttgccccgatggggtgaaatatctaccaatccccgaactgttcataacaagaaatggatacacaccctcaaaagcaaacagtgagttttgggaaaacggcactattccttggtttcgcatggaggacatccgtgaaaacggaagaattttgacaacagcgacccaatatgtttctgaaaaagctgtcaaaggaaagttatttcctgcagattcaattatcattgccacttctgccacaataggtgagcacgcattgataaaagtgccatctttggcaaatcagaggttcacgtatctgacgcttaaagacgagttcaaagattgcgttgatatgatgtttgttttctattattgctttagactcgatgaatattgcaagtcgcacttgaatcaaggaaattttgcctctgttgatatgaaacagtttgcagcgtttaagttccccgtcccgcccctgccggtgcagcgtgaaattgtccgtatactggacaatttcacagaacttaccgaaggcctcaacagggaacttgccgcagagcttaccgcacggaagaaacagtatgcgtattatagggataagttgcttcataacgatgcaaccacagtttataaacgattgggggatttttgcgatttgctttctggattcccttttgatagtagtaaattcaaagaagatggaatcaggttaatgcgtggcatgaatattaagaggggctatttggactttacggaggagaataatcgttattgggaaagcacagatggtgttgagaaatacctgcttaacgatcaggatattgtgatttctatggacggttctcttgttggcagcagttacggaatggtttctaaaaaagatttaccattgcttcttgtacaacgtgttactcgaatccgcactaatcaggccaatatccgatatgtatatcactatattgcgagtggccgttttacggagtatgtgcacaagaagaaaacagctggcgcaattccgcatattagtctgaaagatatatctaattttgaagtaccgcttccgtcgcttgaaatccagaagcgtcttgtagaagttctcgacaactttgatgccctctgcaccgacctgaatatcggtctgcctgcggagattgaagcacggaaaaaacagtatgagttttaccgggatcaactcttgacattcgccgcacagggcgagacaattttgacagacagacagacagacagacagacagacagacagacagacagacagacagacagacagacagacagacagacagacagacagacagacagacagacagacagacgagtatagtgccttgattcgactgtgtcaatatgtttttgggtatgcttttgtagaactttctctggctgcaaatgtctttagaggcgagtatatcacgaagaaagattcgattcccggagatattccggtcatccttggcggacaagaaccagcttattatattgaccggtcaaatcatataggtgaagctgtcgttgttgcaagaagcggcgcatctgccggatttgtttcatattggaatgagcctatctttgtcacagattgttttgggtttgaaacaaagcaaagtctgatgattccgaagttcttgtattatgctctaaagaatatggagcaaaccctcaatgatatgaagcgaggagcaggtgttccacacctgagcggagaggttctgctgagtattccgctctgtgtacccacgataagagaacaaaaacgcatcgtgtcaacgctcgaccgttttgacaccctctgcactgacctttccgccggcctgcccgccgaaatcgaagcacggcagaaacaatatgaatattacagggacaagctgctgacttttacaccggcagattgacccggaaggaggtagcccgtgagctatttcaacatcattgcccagagcagtgaaagcactgttgtcaccgaatacaagccgcagtcgaagcgctcggaggcgtaccagagcgaagcggacttggaaaaggagtttatccgtctgctttgcgagctgggctatgagcgcctgaccatccataaagaggctgacctgattgccaatctgcggacgcagctggaaaagctgaataactatcgctttacggacggcgaatggaagcgtttctgggacgaggtgctggcaaacacaaactccggcattctcgaaaagacccgcctgattcaggaggactatgtgcaggtgctccgccgggataacggggaaagcaaaaatattcagcttattgacaagaagtgcatccataataacagtttgcaggtcatcaaccagtatgccatctccacagaggagggggcagctcatgacaatcgctatgatgtgacagtattggtcaacggtctgccgctgatccatatcgagctgaagcgccggggcgttcccattcgggaagccttcaaccagatcgaccgctatcagcgggatagcttctgggcgtccagcgggctttacgagtttgtgcagattttcgtgatctccaacggcacaaatacgaagtattattccaataccacccgtttcaaccatatcaaggatgccaaagcgcagaaagccaagaagttcaaaaccagcaatagctttgagttcacttcgttctgggcagatgcgaacaaccgcattatccccgatcttgtggactttaccaagacctttttctgcaagcacaccattctgaatatccttacccgctactgcgtgttcacggcggaaaatatgctacttgttatgcggccatatcaaatcgtcgccaccgagcgcattttgaaccgcattgagatcgccaacaattataagaaatacggcaccgtagcaggcggcgggtacatctggcacaccaccggcagcggcaaaacactgacctctttcaagacggcgcagcttgccacgaaactggattacatcgacaaggtgctttttgtcgtggaccgcaaggatctggactatcaaacgatgaaggaatatgaccgctttgaaaagggagctgccaacagcaacacctctacggcagtcctgaagcgccagttggaggatgacaatgcaagaatcattatcaccaccattcagaaactcgccacctttatcaagaagaacgccggacacagtgtttttgataaacggatcgtcattatttttgatgagtgccaccgaagccagttcggtgatatgcatcaagccattacgaagtatttcaagaagtacaacctctttggctttaccggaacgccgatctttgcggtcaatgcaggcatgggcaagaatcccacactccgcacgacagcgcaggcttttggcgatcaactccatgcctacaccattgtggacgccattaacgacaaaaacgtactgcccttccgggtggactacatcaaaacgatggacgccgagccggatattgacgacaaagaggtttgggacatcaaccgggaaaaggcgtttcttgccccggaacgcatccggctggtcacagagtacattctgacccactttgaccagaaaacctaccggggtgataaaacctatacatacagcgtattgcagaatatcgccgaggttgcctctgccggcagcaagcagcagatcgaggaaatcaagcagaagcagcgggtcagcgggttcaactccatctttgccgtgtccagcgtggatgctgcaaagctctactacgccgagtttcagaggcaaatggcggaaaatccacagaagcggctgaaggttgccgtcatttacagctatggagcgaatgaggaagaaacggatggtattcttgatgaggagaatccggaggatacctccgcacttgaccaaagttcccgtgattttctggatgcggccatccgtgactacaacgggatgttccacaccaactattccacagacggggacaaattccagaattactataaggatgtttccctgcggatgaagaacaaggaacttgacctgctgatcgtggtcaatatgttcctgaccggcttcgacgccacgacgctgaatacgctgtgggtggataaaaacctgaaaatgcacgggctgattcaagcatattcccgcaccaaccggattctcaattccatcaaggtgttcggcaacatcgtttgcttccgcaatctgcaaaagcgtaccgacgatgcaatttctctgtttggcgataaggaagcgggcggtatcgtcctgatgcgtggctataaggattactactttggctacgaggatgccgacggaaaatatcacccaggctaccaggatatgattgaggaattgacaacgaaattcccgctgacagaggaacgcattaccggcgaacagcggcagaaggagtttatcgttttgttcggtgcgattctgcgtatgcgcaacctgctgacttcgttcgacgagtttgccggaagcgaaattttgagcgagcgggattttcaggattatcttggccgctatcaggacttacgggatgagtggaaaagccgcaagcccggtggcgaaaaagaggacatcaccgatgacatcgtttttgaaatcgagctaatcaagcagattgagatcaatattgactacatcctgcttctggtacagaaataccacgattcacactgcgacgataaagaaattctcattacgatccagaaggcagtagatgcaagcccagaactacgtagcaagaaggcactgatcgaaaccttcattgctggaatcaacgatgtatcagatgtgatgctggaatggcgcacctttgtcgccgaagaaaaagaacggcagcttgttgcaatcattcaggaggaaaacctgaaagacgatgagactcgccgctttatggagagctctttccgtgacggctctgtcaaaacgacaggcacggatattgaccggctgatgccgccgatctcccgcttcggcggtggaaaccgtgcagagaagaagcagaccatcattgaaaagttgaagggtttcttcgaccgattcttcggcatcgggtaagcaggtcttagggtgtccctaacgaggccttttgcgtagctcgacagaacggagtaaaaaggcactgctcgctcagatggcgcagtcatcggggcgacgcactgttttgctccggaggagtacaaacagtctgctcgttaagataatgcagacgatttcagagcaacgaaaaaggggcgcagccggtgcttacctgcatctgactgcgcctctgatttctatcaaattttgttgctgctcacacgaaaatgacctctgcatttacgatttctgtagctcgattgcggatgttattgctccgcctgacccattccagcgggtcacttgccttgagtttttcgttcaagttttctttttcggacagttccttcacaagcgtatcaaacatcgcctgtgcccgagactccacctcagcaagataatcgttcagcatcccggtggtcaacagattgtaatatctcacccggtggtgctcctttagatgtcgccggtgtcgctgcccccaaatgccgatttgtacgtcgctttgattatcaatctcgagattcggcagaaaataattgcccgcctgtcggtatgtgccgcccagcttttcaaactccgtcattgtgtttcccccaattcattccgtgtatacaaccttgaacttcttgcgctttgcaccgatgattttcagcagcacttcatcaacagcgtcgatatatctgccctctgtgatgagcctgctgcgcagatcattcaggctcccaacgagaagccgccgctctgcatcatccattgcaagatgatatttttgtttcatattctgtcctccttgtgctatcattgtaacggagagactagtaaaaatcgaatgtgcggataaaaatgaatatgcgtgtaggctttcttggttatttgcgaaatcccttatgaacatccgcaccaatgaaaacccgcatgaacaccgatgttttgcgggtttttgattttcataagcaatattggtaacaccgaaagctatgtgcacagcaaacaaaaagccgcagtgctttcctgaaaaagaagcactgcggctttttcgtttgctgttgcgtttacgggctgccgagcctgtatttgaaatctctgtagccgaacgacgctaacttgcggatatcgccgcccgctgtgcgggaataaatgccgggcaggggcatgccgttaaaggtattgtttttgcaggtggtgtagattgccatatcaccgaagacgagcaggtcgccgaccgcgggcacgacgttgaagctgtaatcgccgatgacatcgcctgcaaggcaggttgggccggcaaggcgcaccgtgtacggcttctcccccggctcaccggcgccgagcagcggcgggcgatacggcatttcgatgacatccggcatatggcaggcggcgctggcatcgagaattgcgatggtcgtctcgccgtttcgcacgacatcgagcacgcggctgaggaggtatccggcgtttaacgcgcaggcctctccgggctcgagatacacggtgacattccagtcctgctgcgcgcggcggatgcaacgctccaacgtttccatatcgtagtcgggacgcgtgatgtggtgaccgccgccgaagttgagccactgcattttgggcagcaaatcgccgaacgttgaagcaacggcgtttaaggtcgtttccagtgcgtcggcatcctgctcgcacagcgtgtgaaaatgaagtccgtcgagcagttcgggcaaatgcgcgtcttcttgaacggctttatcccactgcgcacgggtggtgccgaggcggctgccgggcgcacagggatcgtaaatttcgtgtccctcctgcgtagagcactccgggttgatgcgcagaccgacgcttttgcccgcagcttttgctttgggcgcgaacttttgcagctgtcgcggcgaattgaacacgatgtgatccgcatagcgcagcagctcgtccatttcgtcctcacggtaggcggcgcaaaacacatgtacctcgccgcccggcatttcttcagcgccgagccgcgcttcaaacaggccgctcgcttccgtaccgatcaaatgcggcgcgaaaatcggataaagattgtaattgctgaacgccttctgtgccaaaagcaccttgcagcccgtgcgcttttgcagcgcgccgagcacctctgcgttatgctgcaggacggcctcgtccatgaggtagcacggtgtggacagcgttttgaattccggcggaatttcgccgttgatgcccgcaaacggtgggcgtgtatccagtaagttcatcagtccaccaaagccggatcgtggttttcgctgcgcggcaggccgtatttatcaagggcgtcgaggaacggatccgggtcaaactcctcgacggtgtagacaccgggctttgtccacttgccggtgagcatcatcatcgcgccgcacatggccggcacgccggtggtgtagctgatggcctgactgccgacctcgcggtagcattcctggtggtcgcagacattatagatgtagtaggtcttctctttgccatcctttttaccggtgaagatgcagccgatgttcgtcttgccctttgtgcgcgggccgaggcttgcgggatccggcaaaagtgctttgaggaactggattggcacaatctcctgaccgttgtagtgaatcggtgtggtggaaagcatgccgacgtcttcgaggcagcgcatgtggtcaaggtagctctggccgaacgtcatgaagaaacggatacgcttgacttccggcaggtttttgccgagggactcgatctcctcgtggtgcagcagatacatgtccttctggccgacctgatcgaaggtatacgcgcgcttaatgctcatagccgggatttcgacccagtggccgttttcccaatagctgccgggcgcagaaacctcgcgcaggttgatctccggattgaagtttgtcgcgaacgcataaccatgatcgccgccgttgcagtccagaatatcgatggtatcgatggtatcgaactcgtgctttttagcgtaggcgcagtacgcctgcgtgacgcccgggtcaaagccgcagccgagcagtgcggtgaggccggcctcttcaaacttctttttgtatgcccactgccagctgtaatcaaaataggcggagaagcccgcttccttgcagcgcttttcgtaaatggcgcgccattcggggtcatcggtgttctccggctcgtagtttgcggtatccatgtagttaacgccgcaggcgaggcaggcatccataatggtgagatcctgatacggcagggcaatgttcatgacgagatccggcttgtagctttggataaggtcacaaagctgctgcacgtcgtctgcatcgacctgtgccgtggtgatttttgttttggtgatgggcgcaagctttgcggcaagtgcatcgcacttgttctttgtgcggcttgcaatgcacagctcggtgaaaacttcgctgacctggcagcatttggaaatggcgacaccggctacgccgccgcagccgataacaagaactttgctcatgatgatgctccttttatatttttagtttgataatttatacgtttaaggccaataagagctcgcgcaggactttgcaggccatggcggtggaaacgccgcttgcatccagcatgggggctaactcgttgacatctgcgccgatgatgttcgtttttgacacggtgagaatggcgtttaaaagctgcatgaacgtcacgccgcccgcctccggtgtgccggtgccgggaaagcacgaggggtcaaggcaatcgagatcgatggtgaggtaaaccggcacctgcgtgcggcacagttctgcggtgagcgcttcaaggcccgagaaatcgaacttatgcatttcggtgtgcgtcttcgcaaacgtgaactcttccctgtcgccgctgcggatgcagaactggtgaatgcggccgtcgccgagaatgtcgtggcagcggcgcagcacgcaggcgtggcttaattcggcgccgaggtaatcctgacgcaggtcggcgtgggcatcaaagtgaatgatgtgcatagcgggatatttatgcgccgccgcacgaacagcgccgagcgtgacaagatgctcgccgccgagcaaaagtgggaatttgccgtcttgcaggatcgtttccgcgcgcgcctcgatgtctttgagggcgctttcgctggaaccgaagcacagctccatatcaccgctgtcaaacacctttatgtcggttaaatctttatcctgatacgggctgtatgtctcgaggccgtagctttcgtgacgcatggcggcggggccgaaccgtgcgccggggcggtagcttgtggtagaatcgaacggcgcgccgtacaaaacgatatcggcatccgcgtagctgctttcgcagccgatgaaagtttcaatattctggtgcagcattatttctcctccacttcccgcagcatttcttccaaaaatgccggcagataaaatgcgccgacatgcagacgagtggtgtaataacgcgtgcgcatattgagcgcgttccactggttggagtcaaggtcgttgattgggtgatatttcttgctggcaaagccgaaaagccagtagcctgcggcgaaggtgggaatatgcgcctgataaaccttgctgatggggaacgtcgttgcgatgcgctgatggctgcgctgcatggcagtggcatcctccgcatagaacgggctgccctgctggttgaccatgatgccgtcctcacgcagagcattatagcagcttccgtaaaattcgcgggtgaaaagcccctcggacgggccgaacgggtcggaggaatcgacgatgatgaggtcgtactcatcttcacacttgcgaatgaacttcagcgcgttttcgtagtagatatgtacacggcggtcgtccatgcggcaggcgttgctcggcaggtaggcgcggcaggcctcgatgacctgcgggtccatctcgacgaggtcgatgcgctctacgcggtcgtagcgggtcagctcgcgcacaacgccgccgtcgcctgcgccgatgacgagaatgtcctttgcattgcggtgcacggacatcggcacatgggtgatcatttcgtcgtagataaactcatcgcgctccgtgagcatgacattgccgtccagcgtcagcacgcggccgaactccggcgtttcaaaaatatcgatgcgctgataggcgctttgctttgaatataactggcggtccacacggatgctgtgcttgacatccggcgtgtgaaattccgaaaaccacatttccatttttgttcctccttatgcaagcacgttcaggcggaggatatcgggatcctccgggccggtcatgctgcagcctttggctttggcgtattcgatgtaatcgaggatctccgccgtgatgcgttcgcccggcgccaagatcggaatgcccggcgggtagcacatgacgaactcgctgcacaccataccctccgtctcgcggagcggcaggctctttttcggtgcgtagaacgcctcctgcggactggcggcaacctcggggtcgatgtactcctggctcaaaaggccggtgccgtccgtgctgtaccggcgcttaatttcggccaaagcactgacaaggcgctccacctcctgcgggcggtcgccgatggaaaggtatgcaaggatattgccgatgtcgccgaactcgatctgaatatcgtattcgtcgcgcagaatgtcgtagacctcgatgccggcaaggccgatgtcgagcgtgtggacgctgagctttgtcgtatcgaaatcgaacacggagttgccgttgcagagttctttgccaaacgcgtagtagccgccgacggcgttgatctcctcgcgggcgtattctgccatatcggcgacctgatggaacactttgcggccgcgcagtgccagattgcggcgggagatgtccagactggacatgagcagatagctgcccgaggtcgtttgggtgaggttgatgatctgccgcacataaccggcgtggacattggggccgatgagcaataagctcgactgtgttaagctgccgccgcttttgtgcatggaaacggccgccatatccgcacccgccgccatagcggagaccggcaggccgccgccgaaataaaagtgcgtgccgtgtgcttcgtccgcgaggcacagcataccggcatcgtgcgccatttgtacgattgcgcgcaggtcgctgcaaatgccgtagtatgtggggttattgacgagcaccgccacggcgttcgggtgttcgcggatggcttttgccacctgctcgcgcttcatgccgagcgaaataccgaggcgatgatccacctccgggttgacgtagaccggcaccgcgccgcagagcaccaaagcattcaaaacgctgcggtggacgttgcggggcagaataatctcatcgccgcgcttacatgcggtgagaaccatgctctgtacggagcttgtggtgccgcccaccattaaaaacgcgtgtgccgcgccgaacgcatcggcggcaagctcctccgcctcccgaatgaccgacaccgggtggcagagattatcgagcggcttcatactattgacgtccaacccgacgcactgctgacccagaaaggcggccagctccgggttgccgcggccgcgcttatgacccggcacatcaaacggcaccacgcgcatgttgcggaatttttcgagcgcttcatggattggtgcgcggcgctggtcgagctttgcgcgttttacattttcgttcatcttttccctccgttcaaagccctttgcaaaacaaaaaacgcaagcccggcacgtaggtgcagaacttgcgtttgaatcgcttattttttgggcgcatgttctcggaacataaaaacatggtatcccggaaagcggagcgtttcagagtctatatagcaattaaacttttactactcttattgacgtttcacaagtctgcgttttagcgcaatttcatggttgcaaaggaaccatcttataaaatctgagctttttaactcagtcaataaggcagccgaagctgccggtcggcagtggacccggctgtccgtatggccttagcccaaaagggcggtccaaaagtaaaaattgctttgaaaaactcttacatctcacttcgtctttcaaaatcgatatgagtatatcataaacgacaaatcgtgtcaacaaaaaatttggggccgcattatttccagccgcgggcggtggggtcgagcatttcggctgcggaatatatgagcgcattgcagacggcggcggctatggtgctgccgcccttgcgcccaaatgcaacgatggcggggacatgatgcttttcgcacacggcaaaaatgttttctttgctctcgatgacgttcacaaagccgaccggcacaccgatgacgagcgcggggcgcagaccgttttcgatcttctcggcaatggcgaacagcgcggtgggcgcgttgccgaccgccaaaatcgcgccggggtattcttttgcagccttgtgcatggcggcgacggcgcgcgtggtgccgctttcttttgcgctttgggcaactgtggggtctgccataaagcacagggcttccccattcagctttttgagacccggcttggaaatacctgcgagcgccatattcgtatcggtgatgatcgtggcgccgttatgcagcgcttctatggctttttgcacggcattttcggtaaaatgcagcgtttcggcgtactcgaaatccgccgtggtgtgaataacacgcttgacgacggcaagattttcccttggtatccggatatgcctttcttcgagctcttttgcgataatctgcatgctggtgcgctcaatatcggcgggcagatgatgctgcgggatcatgctttgcaccccctcgggttttccatgcccatggcgcggtacacggcatccatatcgaggctgttccgcacgccgtcggctaaaatgtcgagctgctcgcggcgatattcctccatggaaacaggcacggcggctgcagggtctatccccttgcaggtgcagaggtattccgcaagcttttcggtcagctcgccgctgtcaaagagaccgtgcagatacgtgccgaagacgttttgatttgtgcagccctcttttgtgccatccatatgcgtacagaacggctcaccgcggacgatcgtattgcctgtgtgaatttcgtaaccggtgagcatcgcccctgtaaacggcgcggcgatgacttcgtctgtgacctgcgcgcggtgcttttccgcacagaatgttgtttcggtcggcaataagttaaggccgcgcagcgtttgcgggcgaccgctttcggagccatccgggtcgtgcaacgtctcaccgagcatctggtaaccgccgcagacaccaagcaccggcgtctctttcgcggcgagctttaagatgacggattcgagtcccgactggcgcagccagaggagatcctcaaccgtgtttttcgtgccgggcagaatcacaaggtcgggcgcgccgagctcgcgggtgttttgcacgtagcgcacatccattaaagggtgctgctcgagcaccataaaatccgtgaaatttgagatgtgcggcaggcgaatgacggcgatgtccagcggacgcacggcgtcttttttttcaaggcgctcggaaagggagtcttcgtcctcgatatcgacgcgcagatacggcacgacgcccagaacgggcaggtgcgttttgtcttcgagcatggagaggccggggcggagaatttcgacgtcaccgcggaatttattgatgacaagccccttgatgcggtcgcgctcgtccgtctccagcagctctacggtgccgaaaagctgcgcgaacacaccgccgcggtcgatgtcgccgacgagcagaacgggcgcatcgacaagctttgcgagccccatgttcacgatgtcatccgctttcaggttgatctccgccggactgcccgcgccctcgatgacgataacgtcaaaatcttctgcaaggctgttgtaggcgcgcagaatatcgggaatgagtgattttttcatcttgaaatactgcgaagctttcatctggccgcgcacttcgccgttcacgatgacctgactgccgacatcgctgctcggcttcaacaaaatggggttcatgcgcacgtccggctccacacccgccgcctgcgcctgtacgacctgtgcgcggcccatctctaagccgtcacgggtaacgaagctgttcagcgccatattttgacttttgaacggtgcggtgtgcagaccgtcctgcgcgaaaatacggcacagcgccgcgcataataaacttttgcccgcgccgctcatcgtgccctgcaccatgatgcacttggcttttttattttcgctcatttcagcacctcccgcatgattttcagtaacttttcgttttcctccggcgtgcgcacggcggtgcggtaccaggtgttatcaagccccgggtagtttgcacagccgcgcacgacagcgcctttttcttttagtcgctcgccgaaatcttccggcgctttgaataacaggaaatttgcctgcccctccaagacgcgcaagccgagcgagcgcagggacgcgatcattttgggacgctcccgtgcgattaagcttcgcacgtggtcggcatattcggtttcatctaacgccgcgacgcctgccgcctgtgcgagtgacgagactgcccacggctgccccgcttcgcgcatattttctaataatttttcatctccgctgagtacataaccgagccgcacgcccgccatggcgtataattttgtgaaagctttcagaataacaagctcggggaactgcgctaaaaagcgctttgcagtccggctttcgtgctccgggagaaaatcgaggaaacactcgtcgatgacgggcgttgcatgacacgccctgcattttttcaggagtttttcgagaaaactcgacgtaacgatctgcccggtggggttgtttggttgacataagaacaccatatcgatggtttcatggagagcagagagcaactcttcggtgatttcaaaatcgttttcctcttttaaaaagaaatattcgacttcacagccgacggttttgagtgcggacgcgtactctgcgaaagtcggcgcgggcaataatgcgcggcgcggctttttcgcgagcacgagccgaaaaatcaggtctgccgcgccgttgccgcaaagaatttggttttcgtgtacgttttcgcttgcggagagtttttggcgcagctctctgcaaagcgggtcggggtagcggtctgcggtaggcagtgcgtttacgattgccagtgcgacgccctccggcaaaccgagagggctgacattcgcggaaaaatcgagtgcatcgtggccgaattttgcgcggtagcccgcccagtcgccgccgtgtgtgagttccatattctctccccctttacagtaagacgaatgccgcgcgaacgagcagaccgagcacgagtgccaaaatgctttcggcgtacatcatgcggtcggctttcaaaatgtcctccggcatgaccgggcgcagcgggtcgccgatcgtcggcttatcatagtattcaccgaaataatatgcgggcccggcgagctgcacgccgagcgcaccggcgcaggcactttcggtctgcgcgctgttggggcttgcatgatttcggcggtcgcgccgccagatcttccacgcgcccttgacgctgtttcccgtgaacctcgccgcgagcacccacaaaagtgccgcgatacgactcggaatgtagtttgcggcatcgtcaagctttgcgggcacgcgcccgaagtttatgtacttttcatttttgtagccgagcatgctgtccatcgtgttgatggctttgtaggtcagcgcaagtggtgcgccgccgatgagcatgcaaagaagcggcgcgatcacgccgtcaccggcgttttcggcaacggtctccacagcggcttttgtcacgccctccatggaaagcgcgtcggtatcacgcccgacaatgcgagagacggccttgcgcgcggcggggaggtcgttctttttgagctccttgtagacgttgcggctctcctgcacaagtccctttgcggcaagtgactgcgcgcaccagaacatttgaatcaaaagtccgaacacccagtgaattttataaaagaagaagcacaccgcgccggaaagcaggaatgtgccgacaggcaggatgaatgcggtgattgcgccgccgatacgctcgccacgcggtgttttcggtaaaattttccgcaagcttcgatctaaaaaggagataaccttccccatatatacaaccgggtgcggcagccacagggggtcgccgaagattgcgtctaaaatgaatccaccgaggacggcgaagaaaatcagcatgtggcctcctttgtgtactgcacggtcccgatgagatgcaaaacgtgcttttcctgccaatcgcgggcatcgagcacatagccgccggcagtcggcgcacaccattcataataatttttctgcggcacagcgtacttttccatgacggccatctgcgtgccgccatgcgcaacgataacgagcatgtcttcactgttttgaatagattgatttagcagggattcaaatgctttgcaaacacgctcgctgaaatccgctttgcactcgccgccgggacaggtgctttcgcagttagaatccacccatgcgcggtaggcggaatcgtgctccatctctttatagttacgtccctcaaatacgccgaaattcatctcgccgaggtcgtttacggggatatactcggcagtcggaaataaaatctccgctgtctgttttgtgcgctttaacggcgtgacaaaaacggttttgggcgaaaagtccgcctgcttcagtgccgcaagcccggccggtgagagtggaatgtccgtcacgccctgatagcggtaatccacattataggcggtttcaccgtggcgcaaaaggtaaattttcatttgggcaattcccctttcaagacggtcggaatgccgcagaacatctgcacaacacaatcggcacgtgcggcgagcaggcatgccaagcggccggctttttcgcggtttgcgcgctctgtggcatcaacgggcacaacaccgccgccgacttccgttgcggtgataatatcgtatttttcagaaagtattttagcaagtgcttcgaggtcttccgtcgtttcggcctgcttttgcacctcaaaacagcatgtaccgccgagcttttgcgcgaacgtgcgcttgccgctgtaaagcggacctgtgatgaacaccattacaaaattcctccccactggcacacggcgagcgctgccaacatggcgagctctgccctttgcaggaaccacccggcaaggtcgcccgtgatgccgccgaattgctttttcgacactgcgtaataccgccgaaagacaagtaaaacagccaaaactgccgcccagccgccgagcacgatcatcgcagcaccgagcacgacagtataaataatcaagacgcggcgcaccgttatgcggtttgcggcttccgagaacgtatgcgcgagaccggtgtttttcgccatgggaaatgatgccacggcgagaccggaaaacgcacgttccaaggtgagtgccaatatccagatcacaccgaaacgtaccgtaaatttcaccgaagcacagagcgcaaaatacaatatgaaatatgtgcataatcggataactgcaaatgcaccgcagtgtggatctttcaaaatttcgagcttcttttccgcatcaccgtagcttgagagcgcatcgcatgtgtcggcgaagccatccagatggatgccgccggtgacgagcacaggcacaaggcaaaagcctgctgcgcggacgagctccggcacaggcaggacgccggctaagcaccacaacccgccgcacactgcaccgatgagcgggaatgcgcacagcgcgtatcgcatgttcttttggctccattcgaactgtggcattggaatcgccgaaaacatagcgaacgccacggcaatcgtctgcaaaatcgtcatacctttccccctcctttgtaataaaccgggataccgcacactacgcggcagacgtgatccgcgcgggcggcgatgccgttttggatctgcgccagcgctttgaggtacagatctgtttcgtcggcatactctgcaccgccgctgaacacctcgttgccgacaacaatcagatgttcgcattgtttatgtagtatttcaacgccatacagaacggcttctgcggtattgacccccgcacctttcggatcgtacagctcgtttgcggtcaggttgccgaggtcttctagcagaactattccgcgatttggtattctgattttatcaatactgataggtgattcaatcgtttcaaactgtttttcttttcgcatggcgcggtgcttttcgacgcgtttggcgcactcttcatcccatacctgcatggtggcgacgtagtaacgcggtagcgggagctttaaggtcaagctttctgcataggcgcttttgccgcttgctgcgccgccgatgacgagcgtcagcattgcggggtgtacggcgcgatgccgccctccgtgaacgaataacagttgtcgtagaccgcgagtgccatgtcccacagcggcaggcttgcgaccgcgccggtgccctcgccgaggtgcatattcgccgtgatgagcggctttttgccgagcgcttccaaaacgatacgcgccgcgggctccgccgaaacgtggcttgcgaacatggccttagttgccgttgggcacagccgtgctgcacaaagcgccgccacactgctgatgaaaccgtcgataatgacagggatattctccagagcaccgcccaaaaacacgccgcacagcccggcgatatctaagccgccgagcgccgacagcacgccgatcacatcggctttttcgggatgattgatcgcaatgcctttatagatggcctcgatcttgcggcgcagaccgtcattggagagtcccgcgccgcggccggtcatttcttcgggcgcacggccgagcaaaacgctgctcacggcggcagaggttgtcgtgttgccgatgcccatttcgccggtcgcgaggagctttatgccctgcgctttctgctcgcggacgagctcgatgccggtctcgatggcttgtaaagcgtcctcgcgggtcatggcagggccgccggtgaaatcattcgtacccgcacgcacacggcaatttttcacaccgtccacgggcgctcccgcgatgcccatatcgacgggaatcacaccgcagtgcaccgtttccgccattttgcagacgcttgttttgcgctgcgcaagattctgcaaaacggcgcgcgtcacgtcgctgccggactggctgatgccctgcgcgatgacgccgttatccgcgcacagcaccaataccgcgcgctttgaaaaatcgaactgcggcacacctgtaagcgcagccacatcttctaataacggttcgagatcgccaagcccgccgagtggctttgcaagcgacgcccaatgcgcgtgggcggctttgcgcgcggcttcatccggctgcgtgattgttttgagccggtttttaagttctgtttccgtcatattttgtccctcatgtagcggcgggcggcgtccgcaaagcgctgcggcagcggcgtgcccgcccagtataaatgcggaaaacccgcataaaaatgttcgtttgcaaaagtacagtcccacgtacggccgttcggctttgtcgctgtgcacgctatgccgttttcgttggaatcccagtggtgaaattcgtgcacaggaagcaactcgtctttttttagcagcatgctgttctccttcgcagtaagcgtcgcgtaaccgaagcgcacgaggtggccaaccttgaaaccttcgccgggcagaacgcctgccatacggtatttgtcgccgtttacatcttcaagtgtttgacctaaatacaaaaagccgccgcattctgccacagtcggcaaactgtttttgattgcggttttgatgcacaaaagcatctcggtattttcgctgagtgcctttgcgcaaagctccgggtaaccgccgggcagatacagcccgctgatattttgaggcaagcttttatcgtgcaatgggctgaaaaagacaggttctgcgccggcttctttgaacgcttcaagcgtttcggtatatgtaaaacaaaaggcttcatcccttgcaacggcgatgcgcacattaggaatcggaaattcctctttcggtactttgggtgccggacacgcaaagacgctaaagagtttttcaaaatcgaccgtcttttccatcgtctcatgcaaaagtgtgatcttcttttgcagatttttaatctcaccggcggttttaagccccagatgccgactttcgatcgcagctttgggcattgggggcagatagccgataacaggcacacctgtctccttttcgagcatcggtgctaaaatacggtataaattttctttacagtcattcagtataataccggcgatatggtgcggtgtgcggaaggacattaagccgcgcacctgcgctgcgagggttaagcttgcacccttcggacgcaggacaagcaggacgggtagattcaacgtatcggctaaatgccacgcacttgcgatgtcgcttgtgccgccgaggccgtcatagtaccccatagcaccctcgcatatagcagcaccgtgatcggctgcgcttttattatataaattttgcactatttgcagctttgagaaaaacaaatcaagattgtgactttcaacgccgagtacgctgcggtgaaacatgggatcaatataatcgggcccggatttaaacgcacagggattgaggccgcgggctttgagcgccgcaagcagcgcaatggtgacggtcgttttgccgctgccggagttctgcgcggagatgagcatttgcagcatgtcattccctcacaatcaaaaaaacgggattattcgccttcatcaggtgcaaattaccgactgaactgctgcggcttatggcaatttgtgtgatttgcgcagtcatgccatgggttgaaaaagatgaaagcgccgtttgcagcgtttcaagcgcgatagcggaaacacacaggcgagcactcgggtttgcggtcaatacagcatcgatgatctcgggcagattgcccttactgccgccgataaacacggcattcggtgcaggaagacccgttaatttttccggcgctttgccctctacaagtgtcaaattatgtacatgaaatttgtctcgattttgttttatcagcgaacaggcggctgcgtcacactccacggcatacacgtatccgagcggcgcagcaagcgccatttctatgctgacactgccggtccccgcgccgatgtcccagagaatatcggtcggtttaacggcaagctttgcgagtgctgcggcgcgaacctcctgctttgtcatgggtgttttgccgcggatgaagacttcattcggcaaccccggcacacgccgcacgggtacttcacacgactctacaagaagcacacatagcggtgcaaaagcactttcagatatttttcgtactgcattcttactgattttttgctgtggtgtaccgagattttcaccgacaaccgcctgcacgtctcccagcccggcttcggtgagtttcgcgcaaatcaccgcgggagttacttcaccgcccgttaagaaaaatgtaggcttgcccatgctgcacgcagcaacagggtcacatgcacagccgtgcgcggagacgaggttccagttctgccacggttcgtggatggcagcagaaagcaactgtacgctggaaacgcccggaatcacggtgtatccgatgtggcgttcatcgagcacgcggcacagtgcagaggcgccggaataaaacccggtgtcaccgctgtatacaagtgtgatattttgttcttttgttgtttcaagcactgataaaatctcaccgattttatacattgcgatacgattttgtgtacagaaatccggcaagttttcgagtaaacgctttgcgccgatgatgagtgtggcttcatgcaaagcttctgctccctgcgttgttacgctgtcgactgtgccgcctcccatgccgactaaagtgattttcatagcaattctctacacctttcaaggatactttcaactgtctccccgttctcccgcgggcggcgcagtacaaggaggcgtgcaccgcagtattcgcaggcttttgctttttccataaagccgcctactgcgccgccgtcttttgtaacgagccattgaatgttgaattgttcaaggatcacgcggttgaggtcaagtgaaaacgggccttgcatggcgatgatgttgcggtgcggaatgtcgagggcttcgcatgcgcgaataccgtcgagtgtgggcaacacacgtggaaaaatccgctttatatctagatttttaaaagcagacaactcctttgcaccggtcgtgagcaagacattcccggcagtactttcgagatattctgccgcttctgctgccgttccaaacacgatactgttcttcggcaattcgctttcggtacggagcaatcgatggtactcaacgcctgtcgtttcacacgcttcacaaatggtgcgcgtggcttctgttgcataggggtgcgttgcgtccacacagattgacgcgccgtgcaaaagtttcgtcatctctgcggcagtgcatctacctacatgaattgtgatattttcattctcgtcttgttcttctgcaccgatctctgttgcaacactgacaagaacttctacgccgaggtttgccaaaatttttgaaaactgtctgccctctgtcgttccgctgaacaccacagctttcataccgtgcgatacccccttggcgttaccattttgctttcgatattctttgttgttttgttgcctatatatacagtcgtgaacatatcgacctgcttgttttcaagttcgcggagcgttatgatctcactttgctgcctctctctgccaatgttgcgtacgatgccgcagacggtctcctccgatttgccgttctggagcaaaatacggacggcacgctgtaaataatcgggccgacctttcgaggacgggttgtagattgccacgcagaaatcgcccatggcggcgcaggcaaggcgcttttcaatcatttcccatggggtgagtcggtcggaaagggaaactacgcaaaaatcatgcgcaagcggtgcgcccaaaaccgcaccgccgctgagcgccgccgtaagtcccggaatgacctcgatctcgacgctcgggtaattgggtgcaagttccaaaatcgggctcgccatgccgtatacgccggcatctcccgaacagacaagcgccacggttttgccgctttgcgcggtctcaagcgcccagcggcaacggtcgatctcctttgtcatgcccgttgcgtgcacctctttttggggataaaacgagcggataagatcgatgtagacggtgtagccgcatagtacgtcggcgttttcgagcgccgttttcgcctgtgcggtcaaaaactgcgggtcgccggggccaaggcccacgacataaacgagatttcgcttcattttacacgctccaatccggggtaaagggttttgcggcgacggcgaacgtcacgccgctgtatatatgcttttcgatcaccaattcgccgcccgacgccagtacggccgcacgggcgcagacgttgtcaacgcccgttatctgctgcacaaatgaagatgatgtgaattcaccggacgtttttttgagctcctcggctgtataaaaacggatgttaaaatcatggttttgacagaattccaaaagtcccggttcatcttttttgaggtctatgctcgcacacgcacagatgctttgcggtgcacagcctgtttttttgcaaaattgtttaaatgttgcttcgatatgttcagccgatgtgccgcgtttgcagccgacgccaagcacgcagatttttggaacgaggtgcagcgcatcactctgcgggtagagtgttacggaaaaatcggcttgatggttctcgtctgccgggaaaacatttttaggttgagtgcctgtgattttccactgcgaatcataataaaccactttaccggcgagcagtgtgctgctgacggttttgatacgcccaggctcgagcacgtggcagttctgcgctttcgcccactcgtctacggcgaacacgccttcgacgtcggtcgcagtcgtgatgaccggcactgcgccgcagatgctcgcgagtttcttggcaaggtcatttgcgccgccgaggtgaccggacaaaatcggaatggaaaaccgaccgcgctcatcgagcacaatcacagcgggatcggtcgccttgcttttacaatgcggcgcaatggcgcgcacggcgatgccgacagcgccgatgaagatgagtgcatcggatttttgaaagttttcggccgtccaatcggataatttcacgccgtttttaccgccgcgactgacgctgcccggatgtgaaaaagccagactttctgcgagttttagtccggtttcggtgaaagcgatatatgcgcagctcatgctttgctgcctttccgatattccgtcgtgaatgtaggatcgtagagcttactgcggtcgtattgtgtgccgagaaaatctccgacgacaataagcgccgttttggtgatgcccgctttatgcacgctttcggccaaatcaccgacagtacagcgcacgattctttcctccggccacgtggctttgtagacgactgccacaggagtggaagccgtataagcaccctgcaaaagcgcctgctgcacctgattgaccaaaccgattgaaaggaaaatcaccatggtcgcgccgtgcgtggcaaggctttgcagcttttctttttccggcacgggcgtgcggccttccatgcgcgtgatgataaccgtttgactgacagacggcaacgtatattctgcgtttaaagctgccgccgcgccgcagaagctggagacaccgggggtgtcgtcatagggaatgctttctgcatcaagcctatccatctgctcgcggattgcgccgtaaaggcacgggtcacctgtgtgcaggcgaactgtcattctgttgtttttttcgttctcgcgcatgacggaaatcacatcttccagcgtcattttggcgctgttgtagatcgtgcaatctgctttagcgagccccaaaagtgcagggttgacaaggctgccggcatagatgatgcagtcggcagtctgtaagagcgccgcgccacgctgcgtgatgaggtccggtgcgcccgggccggcaccgacaaaatgtaccatgtttacgactccttccacttttgcagcaattttcctgcggtttcggtctgcccaagggggccggtttgattggaaaacagcaccgcgccgacttggaatgcacccgctgcgcggcgctcgaggtgcagctgcacagcgtttatcaagccgtgcatgacgggctcgcgcagaccgttttgatccaaaatatcaaggcaggcatcggttgtggccgcctgcatcagcgcttcgcacacctcttttttcgcgcccgcaagcgccgcatacgtgcagaaaagctccgtgcgacagtccgccatgcgggagtgcgtgttcataataccgcctgcgaccttcacgagcttaccgatgtgcccgacgagtaaaacttcttcaaagtgctctgttgcggcggcgtcgagcgcgtcaccgataaaattcgagcactttatgatgggaatatccatgagcgcagggtaggtttcacgcagataatcgaggccgtagttgccgggagtcagaatcaggcggcgcgcaccgtttttgagcgcagcctgatgaatttccagctgcatcgtatcaacgattgcctgctgactcatcggttccacgatgccgctagtaccgagtaccgaaagtccaccaatgacgccgatgtgtggattgaacgtctttttcgcggcctcttccccaccctcgatggagacaagcacgaaaaagccgcctttatactcaaatgttttggcttcttttaagagggcttcggtgatcatctcgcgcggaacgtggttgatggccgccgcgccgacgggctggtcaagcccgggcttggtcacacggccaacacccttgccgccgtcgattttaacgacgccgtgttcattgggcaaaagcgtcacatttgcgatgacgggcaagccgtccgtggcatcaatatcgtctcctccgtctttgcgaatggcgcatacggcgccggtttcggtcttctcacagtagattggcgcgacctcaacaacgatgcctttcggtgtgcgcagaccgaccgtttccggggccttgccggtaaaaagcagtcgcgccgcaccggcggcaccgagtgctgcgcatgtgcccgttgtgtagccgcagcgcaataatttttgtccgctgcgaatgtagtgctcaaacttcggcggctcctttttaccgaacaggaacgcgtattcttcgtcggacattttatatagcttttgtatgttctctttttgaaacgcgtcttttacggtcatgatgtccgagacactgtccggcgaaacgcagacaacggcatcggagagcttctgcgcaaggtcaagctcgtgcaggctcaagataattgcagtattcttttcttttgcaagccgacgcaaaatcgtcatgagctccgctttacctttaacgtcgaggaatgaagtcggttcgtccaaaaacagaatttccggctcctgacagactgcccgtgccaaaaggacacgctggcgctgaccgtcgctaatcttatcaaaatcgcggtcggcaatatcggctgcatttacgagatgcagcgcgtcgaaaacctgctttttatcttcttcggagaggattccgagacgaccggtatacgggtaacgcccggctgcggcgacatcaaagcaggtcgtgagctctgtgcggttcgtgcgcggcaccatcaacgccattttgcgcgcgcgggcagtcggtgagtataccgaaagggactgcccatcgagcaaaacggcccctccctgcggcgcaagctgcgcggcaagcgttttcatcagagtcgatttacccgcgccgttcgggccgataagcgtcaaaatttgtccgcgctcggcggcgaattttatatgctccaaaagcggcgaattgtagccgaccgcaaggtcgttcgcttcacaatagctcatgctgccgcctcccttctctgcttgcgcacaagcagcaaaatgaccaccggtgcgccgaaaatcgccgtgacagagctgacggaaagctccgtcggcgcaaatatactgcgcgcgatgaggtcacacaaaaggcaaaatgctgcaccgcctaaaacgcaccccggcagcacgtgcaaaggctttgcactgcggagtgtgcgctttacgagatgcggcaccgcgatgccgacaaaggagatcggccccgcaaatgccgtgacgcatgccgcgagcaggctggataacaacacaagtgcgactgagaacggacgcacggaaacgccgacactctgcgcataggcttcacccatttggtacgccgccatcggtttggaaagcataaacgaaagcgcaaggcatggcaacacaattaaagccgccgtgaggacattctcccacgtcatgccggaaaagctgcccatcgaccagttgtgtagattcacgatgttggaatcctgcgcaaatgcaacaacaacgtccgtgacagccgaacagatatagctaatcatcacgccgcagataacgagcacgcctgcgcgctttacgcgctgtgaaacggccaagacgaaacccatagcgaccatggcaccgacaaatgaagctaaaatcagcgtgagtgagcttgtgaacaagccatgatttaaaagcacgaccatcgtgagtgcaacggcgagctttgcgccgccggaaacacccataacgaacggcccggcgatagggtttgcaaaaaaagtctgcaataagtaacccgcaacggacagcgccgcaccgagcaaaacgaccatggcggcacgcggcaggcgtaaaccaaatatgatcttttgcgcgagtgcgttattccccgcgctgaaaagcgtgcttaaaatatccttcggcgaaagggccgtgctgccgcagaaaatgttcagcataaacagcgcgagcaatgcagccgcgagcgcaagatatgaaattgtcagacgctttgtgccgttttgtttcatggtttcctcagcttacatgtgtcagaaatttcagttcatcttcgttgaccgcattcgggctttccgccgcgaacacgcggttcatgtccaaaatcaaatcgggcagctccatgctttcctgaaacaggctttgcgtagtgcaccagacgttgccgttctgcacggctttgaaatctgccagcatgggacattttgataagagctgctcggttgtttcaatcttgccctcgatggtgctgttgtagattaaaacatctgcatctttcgcgccggcgtagaactcctcgagcgaaagattgattgttgcgaggttgttgccgttatcggaaagattggaaaaaacgtattcgccgcccgccatgccaatcatcttcgcaacgtaatcgttcgatttacgcaccgtgacgaggttattcgacgtcacagagaaaaacgctgccgttttgcctgtggtatcctgccccaaaagcggccggatgcgctgaacctgctcgttgaagaacgtttcggcttctgcctctttatcaaataaaatgccatagagcttcacccactccatgcgtgccaaggggtcggattcatagctggagcgctcaacaagcacaggaatgccaaacttttcaagctgctctttcacttccggcgtgtggtaaatcattgtgttttcaatcgcgagaccgcagtttgcagacacgatgcgctcgtaatccggcgcgctgtacttacccgcgtaggaaatttcaccgttttccatggcttctttcgcttccggcagataccagttttcggcactcgtgccggaaagcgtgacggcgcttcgtgcatcgagcttcaggatcgggtccatcgcagacgtggagacgagatagacattttcaagcggtttctgcaaaacggtgatgtcttccgaaagaccgttcggcacggtactgttttccggcacgacgaggtagcgggcattctgaatggtgatgagccttgtaccgccggtgcactcgtctacggtgaactctttcgcgtattcgagcggataggcgctttcgacttgaaaatctgcttgcgtttcatcggcctgcgctgggcttgatgtactctcaggctgtgccgggtttactgcgcagcccgtgaaagccagaagcaaaagcgccgctaaaagcgctgtaagccgtctcatgcggtaagagacgcgctgtcaaacgtcagggtgtattcgatctcgtgcggagtgctcatagcggtggtatctgccgtaacggcgagtgcggtatcaagtgcggcgacgggaatttcaaacacggagttgccttcggtattgacgggcaaatacttttcgccgtccacgatcatgtaatcgtagtttgggctgctccatgtgatctccgcggtcattttgccgtccgcaacggtgagctccgtggggctctcgattgttgcacggccggaaccgccctcaagcgtgacgttgcacgtgtacgtgccgtcctccggcacttcggtctctgcgtcgcttgcggtgtcctcaacgatcggctgcgggttacgcacgctgaccttgtggtcgtaccacgtgcccttcgtgccgatgagcgcaaggtcaaaatctttatcgacacttttcagcgggatgtcaaagccgtagacttcttccgatgtgccgtctttataggtgacggtatcggtggtcggctgaagccattcgccttcgttctgctttgcgtcctctgccgtaccgaggtacagatttaagatcttcttagaacgcaggctgacgtggaacgtcatctcgccgttttcaactgtcagcgtgcccatgccctcgcaagcttcgttcgcctgaaacatagagctgtccgttttgaactctgccgtgtacacgccgtcttccggcacaacgtccggctcttcggcggaggtgggctctgcgcttgaaacggaagtttcggaagacgcactgctttcattcgtattgcctgcgcacgcgctgcacccgaagatcaggagcgctgagagcaaaagggctgtaatctgcttctttttcattttgttatacctcttctttattttaaaaacaatctataaacataagcgcccgaagagcgattctctccgggcgctgtgtttacggattagccattcagggaatcgatcgctgcctgcgcgtggtcgatgtagagctgctgaatatccccaatctcaccgagacccgcaatctgcgtatcaacgctgtcgaagcagtccgcagccttgaactggctcaaccaggaatcttcatcgtcgccagccatatcgttgttggcatggtcacctgcaacgaccatcagcggacggagcacaaccttcgtaaagcctgcttcctttaccttttcgataacggcttcgcaggaggtgtcttccggctcaccctcaacggtgccgatgaatacgttcgtgtagccgagtgtttccatggtggtctgcatctggctgtaactgacctttgcaacatgcgccgtaccgtggcccataaagacgaatgcggtaccgtcttctgcagcggcagcgacgtcatcataaccggcggttttcacagcttcggctgtgatggcctttgcaacagcttccttatccgcgttgataaccgtcgcgtcgtcgcccacttcgccgagcagcggctctgcaacagcgatgctctcaaatttatccttataccggtcaagcagctcgttcatttcgtcgtactctgcgccgtgcataagatgcgtcggctgcacaacgaggttcttgacaccgtttgcaacagcgcgatcaagcgcctgctgcatgttatcgatcttctcatcatcacgcgcctgcacgtggttgatgatgatctgcgcggtgaacgcgcggcgaacagaccaatccgggtaggcttcctgcagagcgtcctcaatgcccttgatgtcctttacgcgactgtcgttgaaggacgtaccgaagctgacaacgagcagctcgttttcgccgatttcgtcttcgttgcgcggatcgtcttttgcagcgtcgcccgtatcgcggccgaaataatccgggtcggcgttatcgccttccacaagctccttctgcgcatcggtcagcgcgtcccaagcttcttttgctgctttgcattcttcatcggtatgatcattgcgctcctgcacatagattgcgtcgatgagatccgcaacattcttcgctgccatttcgtctgtttcctcctcggttgcgctcgccgcgctgctttcgactgtggaagaagtgctgctctcctcagaagatgcgctcgaagacgcgttattgccgcagcctgcggcagcggtcgtgagcattgtaaccgccattaccagtgcggcggtctttttccatgtaagcttactcatgggttgtgcttcctttccgtgggcaatatcggcccttatcgtattttcgctgaaagaaaggtacaggaaaccaaggcatatctgaatcctcttcaaatacaccgtatgcccatgagaaaagccgaggtcctttgtgctgctgaaacgtacaaaatgtatagaacggcaacacaaaaagaccccggcgtatcgtcagagcattttcggtacaaccaattcctcgtgatttggagtgtgacactcccgtaccaacacacaggcaggtttcccggctgaaagatcgtcatctgccgccgccttcccaagcgatgctcagtgaccggcaaaacgccatggcggcaaactcccttatcacggtgacgagatcgtgcgggatttgcacccgcttcccttttacccttttctatgcgcttttaaaagcacacgaaaggcacctgttgttttcattcagttttcgcagtacagtatagcacaggaaatgcaaaaaagcaagataatccgccgttttttgccttgcatgcaaatttgcccgaaacttaagcaaaacgtcttgctattttatgcgaaacgtgtataatatacatgaaaatggacgcgtgaattgccgagtggcggcgatttacttttatcagggaggaattgaatttggtcaaagttgcaatgatcggcgtcggtgccatcagcggcatttaccttaaaaacatcacgacggtgtttaaagaggtggagctcgtcggcgtatgcgaccttatcccggagcgcgcggaaaaaggcgtgcagacggtgaaggaatatattgaagcaggcgcaaaagcccccgtgccgaaaatttataaggatatgtatgaagcgttcaacgatcccgaagtggaggttgttctgaacctcacccgcccgtatgagcactatggcgtgacgaaagccgcgctggagcacggcaagcatgtgttctccgaaaagccgcttgcggcggacatggaagaaggcgacgagcttgtcgccctcgctgaagaaaagggccttttgatgggcggcgcgccggatacgttcatgggcgcgggcattcagaccgtgcgcaagcttgtcgatgacgggtacatcggcgacattgttgcggcgaactgcgcgatgatctgccatggccacgagacatggcacccggacccggagttctattataagcgcgcaggcggcccgatgatggacatgggtccgtattacgtgacggcgctcgtgcagctcatcggcgaagcgaagggcgtcatcggcatgacgaaaaagacgttcccggagcgcatcatcacgtccgagccgcactacggcgagaaaatcgacgtcgatatcgacacgcatctgacgggcagcattgcgtttgcaaacggcgcggtggcgcagatttgcacaacatttgatgtgcattacgcacccggcgcacagtgccgctttgagctgtacggcacaaggggcaccatctgcgtgccggacccgaacacgttcggcggcccggtgctcgtgtaccgcccggaggatcaggtaaacgggcaggcaatcgaccccggcttgatagcacacaacgcgccgcagtattacaccggctacaaagaagtgccgctgctgttcgactacaatgaaaactcccgtgcactgggtctcagcgacatgtgcaaggcgttgcgcaccggccgcgatttccgcgcgaactaccaacagcagcaccatgtgctggagattttgacgagctttgaaaaatccagtcgcgagggcagatatatcccgctgaaaacacactacacgcgcacggcaccgatgcagaacaacccgatgcacggcattctggatgaataaaacggaggtacatatagaatgaaagcagcctataccggttggacttggctgaccgccaaggacgctgagaccgccaaaaagcaattggagcagtcttttaaggaatgcaagttcctcggctatgactatgtggaaaacttcgcctttatcggcgattattttgaagacccgaacgagctcatcgagatggaaaagcgctgcggcgtggagcttgtgaacctgtacggtcactttggcaccgatgtggaagaaaacattgcagtcggaaaaaagcaaatcgattttctcgcagccatcggcggcaagtggtacaactgccagcacggcgggtatttcggtgacggcggtccgctggagcgcccgacaaaccccgaggtgctcgataaaatctgcgccattgcggacacgctcggcgcttacgcaaaggaaaagggcgtgacgctgtgtttccacccgcactacggcacatgcgtgttctgggaaagcgacattgattatttgatggcacacaccgatccgcgctacgtttcgttctgcatcgatacggcacacacaacgcttgcgggcatgtcccccgtcgagctcatcaagaaggtcggcccacgccttgcgtatatgcacctcaaagacgtagacacctacgctttgaagaccgcagagggtgcagacaaaatgggcacattccgcgcgctcggccatggcaccatcgacttccctgctgtgaaagcggcgcttgaggagatcggctacaacggcattttgtgcgtggaactcgaccgcccggaggtcggcaacttccattcggcagaggtttccagaatttacattcgagacgtgctggacatttaagtttatttaggagtgaattttatgacaaacgcaaatcccgtaaaggtcgcgatgatcggcgtcggcaagatcagcggcatttaccttaaaaacatcacgaccgtattcaaagaagtggagctcatcggcgtatgcgacctcatcccggagcgcgcggaaaaaggtgtgcagacggtgaaggaatacatcgaagcaggcgcaaaagcccccgtgccgaaaatttataaggatatgtatgaagcgttcaacgatcccgaagtggaggttgttctgaaccttacccgtccgtatgagcactatggcgtgacgaaagccgcgctggagcacggcaagcatgtgttctccgaaaagccgcttgcggcggacatggaggaaggtacagagcttatggcgctcgcaaaggagaaaaatctcctcatgggcggcgcgccggatacgttcatgggcgcaggcatccagaccgcgcgcaaggttattgatgacgggctgatcggcgatgtcatcggtgcgacatgcgcaatgattcagcacggccccgagacatggcacccggacccggatttcctctataaaagaggcggcggtccaatgatggacatgggcccgtattacgtgacggcgctcgtgcagctcatcggcgaggcagtcggtgtaacggctgtgacgaagaaatcgtttaaagagcgtctgatcacctccgagccgcactacggcgaaaagatcgacgtggaggccgatacgtacctcaccggcaacatcacgtttgcgaacggcgccattgcgcaggtgttcacgacgtttgacgtgtactatccctcgcagaactacgcacgctttgaaatttacggcacgaagggcacgatgattgtgccggatccgaacacgttcggcggcccggtacttttgatgcgccccgaagacgtggcggcaacgcactccgatcccggtctgcgcacaggcaatctgcccgcttacgccggctacaaggagattcctctgctgttcgactacaacgtgaactcccgtgcgctcggcctcagcgacatgtgcaaggcgctgcgcaccggccgcgatttccgcgcgaactgccagcagcagtatcatgtgctggagatcttgacgagctttgaaaaatccagtcgcgagggcaagttcatcccgctgacgacgcattacacgcgcaccgcgccgatgaaaaacaacccgatgcacggcattttggacgactaaaatcgcataaaagcacagcccgcagcttgggttttcctgctgcgggctgtttgctgtttattcatagtgttttcagctcgtctgaaaattgccgaaaggcggtaggcagtgcgaaatcgtgctcaatctccgcaaggcttgcccatgtaaacgcttcggacatcgcgttgcagcggatcacatagccggtcatctcccagcgaatatgcgtgaaaatgtgcgttttgtgcgtttcgagcatcagctccttcgggtcggtgtgaaagctctgcgctgtttgcacggcgatttgggcatcgagcttttgaggtacgttcggaaactgccataacccggcgagcaaacccgtcttgcttcgcttttccacggcgaatctgccgttgcattcgagcaaaagcacggtacgctcttctgttttctttgcggctttcggacgttttacggggtattttgtgacgtttccggctgtatatgcacggcaaaagctctgcgtggggcagacttcgcacttggggcttttcggcgtacagacacacgcgccaagctccatgagcgcctgcgtgaacgcaccgcagtgccctttcgggtagaccttgcaaagcgcctcccctatctctttttttacctgcggcaggtcgatcgggcggccgtccgccgtcatgcgcatgattatgcgcagcacgttgccatccacagccgccgcaggctgctcaaagcaaatggacgccactgcgcctgccgtatatgcgccgatgcccggcagcttttcgagcgcttcggcggtatcgggaaaagcgccgttttgcgtttcggtgaggagctttgccgttttctgcaaatttcgtgcgcgggagtaatagccgagtccttcccagagctttaacacgcgggcttcgtcggcttctgcaagtgcctgtaccgtggggaacgcttccataaagcgctcgtaatacccgatgacggcttccacacgcgtttgctggagcatgatctccgaaacccacacgcggtacggctccttcgtgtgccgccaaggcaggtcgcgtgcgtttttctcgtaccacggcagcaaaactcccggcagcgcagcgtaaatttcgttttgttccatactatcccctttttccactcttttgatcttgggtttacagtatagcacacccgttctaaaaaaggaagcggtattgcatggaaacggcagatgcggtataatcggtattatcttgactttcccgtttaagttttgtatactttacaaagcatactgaatttataggcgatataaagacaaacgctaaggagcgaagaaatatgttgaaccaattttccagaacggagctgatctatggccgtgacgccatggagatgctgaaggatgcgcgcgtagccgttttcggtatcggcggcgtgggcggctacacggtagaggcgcttgcgcgcagcggtgtgggctcgctcgacctcatcgacgacgacaaggtctgcctgacaaacatcaaccgccaaatctacgcgacgcgcaagacagtcggtcagtacaaggtggatgttgcggccgagcgcattaaagacatcaacccggacgccgtggtgcgcacatacaagacattctacacgcccgaaacagccgaccagtttgattttaaacactacgattatattgtggacgccattgacacggtgacaggcaagattgcgcttgtgatgaacgcaaaagcggcgaaaacgccgatcatctgctccatgggtgccggcaacaaggtagacccaaccgcgtttgaagtgacggacctatacaagacctccgtttgtccgctggcgaaggttatgcgcaacgagctgaaaaagcgcggcgtgcgcaagctgaaagtggtttactccaaagagctgcccatcacacccgtggacgacatggccacaagctgccgcacgcactgcatctgcccgccgggcaccgagagaaagtgcacgcagcgccgccaagtgccgggcagcaacgcttttgtgccgtccgttgtgggactcatcatcgcgggcgaagtcatcaaagatctgaccggcttcaaaggtcgcggcatcggcgcataatctacttggattacgccgcaatgtgcctgcttcgtggaaccctccttccgcgcggtgtatgccgtgagctgcgaccgtaaaaatgcgctgaactcttggcgcatccgtttaagccatccgatgaccgaggatgaactcgatgaatttgagaggatcctcgacaagctatatttggagtttacataaaatggaaagagaacttgaaccctaccagcgcgttgagcgcagtatacaaaagaaattccgcaagtcgatctgggtgccgttcatcgctgcggtgaagcgttacgagctcattcaggaaaacgacacgattgcggtgtgcatctccggcggcaaggattccatgctgatggcaaagcttttgcaggagttgcaaaaatacagcgaagttccgtttgagcttgtgtaccttgtgatggacccgggctacaatgagctgaaccgcaagaaaatcgaaagcaatgcggcattactgcacattccgatcacgatttttgagaccgatattttttccgtggcaaacaacaccgaaaagaacccgtgctatttgtgtgcaaaaatgcgccgcgggcatttatatagcaaagccaaatcacttggctgcaataaaatcgcacttggacatcatttcagtgacgttgtggaaaccaccgtgatgagcatgttttacggcgcacagttacaggcgatgccaccaaagctgcacagccagaattttgaaggtatggagctcattcgccccatgtattgcatccacgaagacgacattttatcatggaaaagatacaacgatttggagtttatccagtgtgcatgccgctttacggaaaactgcgcaatgtgtgacaatgacgtaagcgtctctaagcggcaggaaacaaagcttttattgcgccgcttaaaacgcgataatccgaatatagaaaagagtattttcaacagcatccattccgtttgtctcgacacgatggtcggatataaatcacgcggtgtgacacacacgttcaccgagatctacaacacccgcacggaagaactgaacgaagaatcaaaagaagacgaataacacaaagggcgaacagcggaaatctccggctgctcgcctttcgttacagcaaaagagttagacatcactaactttaaagaagttttatttgctttatgtagttgacagtacgttttagttgtgctatcctctattttagttgaacatacaactaaatgcttttacctgaaacggaggcacagctctatggacagcacagagcgcaagataaccaagatcgcccgtgaagccaatcggtttacggtgcagacgatgaaagaagacggcataggtacagcggaaatggatgtgatccactttgtacggcataaccccggtacaacacaaaaagaaatgtgggaagcgctgaagatcgacaagggcgcaacggcgcgtcgcgtggcgcggctggaggaaaagggctacctcacccgcgagccgaatcctctggacggcagaagtcagctgctctaccccactgaaaaagccgaagcgctccgcaactccaaggcggaaattgagggttcgttttacgagtggctgctcgacggcctgcctgatgatgaaaaagaggtgttctgcaaaacactgaacaccctctatttaaaatccaaggaagaacgccgcgcaggttttctgcatgtcacgcagcgcgtaaaagagaaagaggctcagaatgaagacaaataggacgtctgcggagtttcaaccgaatcgtgtcctctcttactttaaggcggagtggagagcactgctgattgtcacagtctccggcctgatctacaatatcggtcttttggccgggccgtggtttgagggcacgatgaccgggtaccttgtagagattttaaacggcaccggacagttttccggcatgctgatgctcgtcatcagctttgcggtcgtcacggcggtcgtgcagatctcacgctacgtgaagcgcttttacgtacgccgctttgcaaacaatgtgaatcgccgcatgaaagaatttttgtatggcagccttgtgaaaaaaagccgtgcaagcctgcgcgaagaaggcgaaggcaatatcatgacgaaggccattcttgacgtagacgactgcgtggagggcatgcgcaaattcacgaccgagattttcgacaccggcgtggcgctgacagcatacctctgcatgctgctgtggtatgattggcgtttgactattttgtgcatgcttttcccgccgatctcgtatgttacggcggaaaagatgaaaaaagtcattcaaaaagccggcgcggcgtacaaggagcaatccggccagctgagcaccgctactctggaccgtgcagaaaacgccatgacctaccgcgctttcggccttgaaaaaaagcgtcaggccgtatacgaagaaaacctgacgagctatgaaaaagcagccgtgaaagcgaacatctggaacgctgccatgccgccgatctaccgcatcatctctatggcgggcgtgttcttcattttgtatttcggtcagaagaatgtgctgggtaccggctggcaagcatggagtattgcttcgtttacaacgttccttgtatgctttgtaaagctttccgtaaaatcctccagcgccgcaaagctctttaacgcggtgcacaaggcgcaggtctcttggaaccgcattaagcccctgttaccgcaggaagaggaaaacgaggccgatgaagtcaaagtaaagaaaacgcccgttgcggcgctcaaggtcaagcacctgagctttacatacccggacggcaagaaaattctcgacgatatttcgttctcggcgaaaaagggccagatcatcggcatcaccggcgcagtcgcatgcggcaaatcaacgctcggcaaggcgtttttgtgcgaatatccgtacgaaggccacatcacagtggacggcgcagagctgcaaaacatggagcaaagcgtgcgcacgggcattgtcggctacctcgggcacgacccggagctctttaacgacagcgtggaaaacaacgttctgctcggcgacagcaaaagcagcgatacgtatttaaacgctgcgtgcatgaagcaggaggtcgcggaaatgaccgacggcaaaaatacgctcatcggcagcggcggcgcgtacctttccggcggtcaggcaaagcgccttgcgtttgcccgcacgatgtgccacgataagccgattctcattctggacgatccgttctccgcgctcgataagaacacggaaaagcaggcgttcgtcaatttgcaagcgctcgcaaaagacagcatcgtgcttttgatttcgcacaggttatacctcttcccggagatggacggcgtgatctggatggaaaacggcaaggccgtgaccggcacacacgaagagctgctgaaaaccgtccccgaatacgaaaacctgtatacatcgcaagtccataccacagagaacggaggtgccgaacatgacgcgcaaaaaacaagtgagaacggtgatctttgacacagtaaaaaagcaaaaaggcctttccctcggcattgtttcggccgttatcggcgctgttgtgttcgcgctcatcccgccgctgatcttagccgatattgtggactccatcacagccggaaccgacgccgcattcgcacgtatcctactgtatttcgccatgctggcgctcaccgggttcacagaatccgcgcgtgaaagtctgctcgtggtattcggccagaaaatcacccacgcgctgcgcagcagcttaatggacaaatttacacaccttaccgccgacaacatgacaaaacaggagcccggcacgctcgtttcccgctttgtcggcgatgtcgataccgttgaaaccctattctcctccggcatcatcagtatgttcgccgatgcgtgcagaatcatcagtattctggtcgttatctggttccaaaaccgcggtctggcaatcgtattgcccgttttgctgccgttcctgttctgcttcacgcgccacgtgcagaaaaatatgctggcagcgcagattgaaaaccgcaaggccgtgggccgcgcttcgggccacgtaccggaaacactgcacaacatccgcaccattcactgcctcggcaaagagaagtacatggaaaagcgctatgacacgtacatcaatgagagctaccgcgctatggaaaagacgaacttctatgatgccgtctactcccccgttatcctcattacgaacgcggtggtcgtcgccgtcgtcatgctgctttccgcttccggcaacaccaccgtgctgacgttgttcggtatgtccgccggtacggctgttgccgttatcaactatatttcgcagatcttcacaccggttgaaagccttggcatggagattcagaccatccagtccgcattggcgggcatccaccgcatcaacgagttcttcgcgctggaagaaaatcccgataccgtaccgacacatgagccgaagaccatcaccgcaagaagcggaagcgtgccgtttgtcgagttccgcgatgttacgttcggctacgataagcgcgtggtgctggatcacttgagctttaaagtcatggacggcgatcaggtcacgctgaccggccgcaccggcgccggcaagagtaccatcttcaagcttcttctcggtctttataagccgcagagcggcgaggtgctcattcacggcgtgccggcggccgatatccgtgatgatgaacgccgccgtctgttcggctgcgtagagcagacgttccacatggtgccgggcaccgtgcgcgaccagatcacgctatatgacagcacaatcagcgacgaagccgtgcacactgcggcggagctcaccgggctcaaggatacgattgaaagcatggaaaaaggctacgacacgcgttgtaccgatgatctgttctcgcagggccaatggcagcttttgtccatcgcaagagctgcagcagccgcaccgagcatgctgctgttcgatgagatcaccgcaaaccttgacgccgagaccgaacgcgccgtgctttccgctttgaaacgcgtagcggaaaaccgcaccgtcatttccatctcgcacagaacttctgccgaacttggtcgcattattgctctgacagattaaacacaacacacaaaaggcgaaccgctctttaccagaacggctcgctttttaatttacataaatttattcagtttacataatccaattttgcgcttggttggattactgggatcaacgcgctgttatgtatatacttattcaacggaatacaatccacatacgagagcgtttcgttccacgggtcaaactcaaaaagcagcaagctgttcgctttatccgtacttgtgtatgcgactgaaaagtaaatttttgagttcaccacaatgaccttatcaaattgcagctgtgtagtcggactccacagatagttcgttgcgcccactgcttcattcactgctttttctttctcaagctccgcggataattcttcttgatagatctcatacagctgctttgcgtattcgttattcagctcgtccaatccgaagctccaacgccggtcggttttataattgccgagcgataatgtctcgccgttgtcgcgtacctctgcccacacgtcgttttcgtagaggtgatattcgtccatgcgtacagcccgcacctcgtcgatcatcatgttatactcgaacacatggtcataatctgccagcgcaagctttcggtcgatccagaaaaagccgagatagtggatatccgggatttccatgcaggtgttcgggatttggttcaacgaatcagaagctctataatcatattttttaaggccgggtaaattgatcagcgaagcagaaagcaacaacttgcgatcttctctttcgggataggtttccgaaaccacggaacaacgccaagtagctgtagaaccctttgttacacccgtttgataccccgaatttaccgttgtggtcatgacagtcgagctcggtgcgacgtaatagattcgaccgttgtatatcgccgcgatctcggattcccatacaagatcatttttgccgcagctgagctgctgcacttcgcctttgcgtttcagatagatgccctcatctacaacagcgactggcgcgctcacctgccgctcccagtctttgaattcgtcgtacagcttcatgttgtttttgcccgtttcaccgatgaacccgattttcgatttaaataatcccgctgtgactgttgcaccgcagccggaaagcaaaagcaccactgttaaaacaccggaaagaagccgtttgtaagctttcattctctcctcctccaaagcaatccaatttacataacattttataatcatattcttttatattcgtacatggaacaccgctgtttcgtatcttacgacccaatcataccatgtcgctcgcgaaatgtccacttttttaattttgagcaaatttttctatgtgaaaatcacacaaaactgattaaagctgattataccgcttaaaaccgcccatactcctgtttgcaagcgccgcaaaaattgcaaattgtggaggtgcttttatgtatgcgtatgcgcagagcaaagtggagatttgcggagtgaacacggcaaagctgcaaaccctgaaaaacgacgagatgcgcgagcttttagaccgcagccatcacggcgataaagatgcgcgcgataagctgatctgcggcaatttacgtttggtgctcagcgtcatccagcgctttacaagccgcggcgaaaacccggatgacctctttcaggtgggctgcatcgggctcatcaaggccatcgataatttcgacccaagccacgaggtaatgttctccacctacggcgtgccgatgatctccggcgaagtgaaacgctttctgcgcgacaacaacgccgtgcgcgtcagccggtccatgcgcgacacggcgtaccgcgccatgcagatcaaagagcagctgacgaacgaaaacggcaaagaaccgaacatcacggaaatcgcaaagcgcatggagctgccgcccgaagacatcgtcatcgcgctcgaatccatcgtggagccggtgtcgctttacgagccggtgttttccgacggcggcgacaccatttatattatggatcaggtgaaaggcggcacgacggacggcgactggctggaggaaattgccatgcgcgaggcgattcgcgatctgaccgaccgcgagcgaaaaattctttccatgcggttcatcgacggcaaaacacagaccgaggtcgccggggagattggcatctcgcaggcacaggtctcacgcttggaaaaaggcgcgatgagccgcattaaagcagagctgtgagccagaacggcaagggaattcccctgccgcgtacataaaaacgcaggcttatgaaaagtctgcgttttatctgttttaattcaagttttgtagcggttcggataaaacctcgcgaagtttttgctctgtctcagctgttttggggcaggagccttgcgatgtcacggggctgccaccgccttttgcgccgagcaaagcgttgattttctgtgcggcggcgcggcagtcgagcacgccgtttttgccgcgcgcgcaaatatagcgcaaacggtcactttcattgcagaacagcacagcagagaaattatcgtccgcgcaaagcgtttcggcaatcgttttgcatgcgtcaaaattgaccggcaggtatgccgcaatgaaattctcctgtgcttcggcatacagcttttcgctgtacaattttgcaagctgcgcgtttttctcgcggagcttctggttcaggccctgcacctgttcttccttgcgggcgagcgcgtcgaacacgccgtccggctttacggaaagcgcagcggcggtgcggcgcagctcggcgttttcctttgtgaagtgctccagcgccaacacgccgcaggcgaacgtgatgcggcagccggatttataccgcgcatgctctaaaaccttgattaggccgaccggtgcggtgctcatgaaatgcgtgccacagcaagtgcacatttcggtgtgatcaccgtcttccacctccacgatgcgtacttcgccgtgcagcttctcatttttcttgcgcagcggcagattcggaagctcggaagcgtccacattaaaaatacgcacgggcgcgtttttccaaacgagttcatttgcgtatttttcgccggcctcgatctcctcatccgataaatcgtggtcaaggtcgatggtcacgatgtctcccgccatgtgaaagccgacgttttccgcgccgaacagcacgtcataggcatgcgaaagcaggtgttcgcccgtgtgctgctgggtgtatttcaaacgctttgcggcatccactttgagcgtgacgatttcgcccaccgcaaacggctttcctgtgcggtgcagcaccgtgccgttcgcttcaaagcagtgcgtaaccggcacaaagccctgcatagggtcgtaaaccgtaccgatgtcgctcagctgcccgccgccctccggaaaaaacggtgtgcggtcagtctcaaggtcatagccgtcgtttttgttcggcgtacagctcacaacacgcgcggtgcattcgagcatctccggcgcggtgagatacaatttttcgcagctcatttatgtactccttttgtaaaacgaggtgccgccgcagccgcaccccgcctattctatgtttaattcagtttaattcaaaatgttccgcaagcttttgaagcacttcttcgcgcgtatcgcgctctgtgttttcccgtatcagcgtgaaaaatccgctgtgcagataagcttcatacacctccgggctgttcaccgttgcaatacataaagtgttctcctttgctaaagctgaatttcgcttcggtgttttcagtatagcatagaaaactctaaaaggctaccgaaaaatgaaaaaatgcgccggacgcccgacgcatcttgaattttcagcttatctgccgcagcacttcttgtactttttgccgctgccgcaggggcacggatcgttgcggccgaccttcggaccctttacgatcgtggtggaagccttctgtgccttgtagagctccttgcgcttctcttcggtgagaatggaatcccactgcgggagcttatacagccactcggcctttgcgccgaccatgttgtaatagagcttctccggctcgtaatcaagggaaacctcagtctcggcggtcatattctccaggtcgttttccgccttgagactctcgttgatgccgtcaaggtagccggtcatttcgatgatatccacgccgaagtggtcagcgagtgcctgtacggtgccgctcttcggagcttcgcccttgaggagcttctcgtaaaaatccttttctctaaggaaatattgtgtccagtactgttctgcgccgggctctgcggacttcttgtctgcaaaatcctgccaatccttaaaaagtgccatgatgcttcatccttttcgtatcttttaagcggctttcggttatcccctgaaagtctatttttgattataaccgaatccgctgcttttttcaagcagaaactaccctaatatattgaaaaatagtgtcaaacgtgctattcttataaagaaatcccgattatatttcgattttttagttgaatttctatttttttgagcacaaggagacaaaaatggaaccgaacaacgagcgcaaaacgcccgcgggcgagcaaaatgaactctttaaaaagcaggtcttcagcgatgagacgctgcgcaccgcagatcccgatgaagaagaaaccggtgagcagcattttgaaacgctcactttcgataaacccgccgtgctcgacgaacgctttgccgcgcgcaaagcagaacgcgaaaccgcacagccgccgcaggcaaaaccggcggctcctcgtcctgccgcaaagccggtaaagcgccaagtgcccgccgcacagaaaaacaaatccgtttctcatgagcgcagattgtacagcggcgaaacaccgtccgacgcagcattgcgcatcacgcggcagattgcggcgcttgtactgtgcctgctgcttgtgtgcggcggcttctgggcaaagggcaccgtgtgggacatttggaccgaccgcgatattgaagacgtgcagaaaagcacgtattacagtgctgccgcaaacagtgcgcaacttcgcttagatcagaatcttcccatcggttacgacgccgcgcaggctgtatgtatttctttgggacagcccatttcgtcttccgctctcctcgcaaaagcagatgacaaagacacgctcatcttccccgcagaccttacgggcagtatggaaacggcgctcggcagccaaaagctgcagcttgaaaccggccttacgaacacagatcttttcaaagaaatctacaaaagcctcaagaaaaagaagcccgtcatcgcgctgatgctcgtcgctgacgcagaatcggccaagctgcaatacggtgttgtgaccggccttgatgtcagcaacaaccgcgtgaccgtggcgctcagcgaaggcgtggacacgtacacgctggcggagtttgtcgctgccacacgctttgaaaacacgaagaacatcccgcttcgcttgcggttttcgctgcttttcggtacactttcccgcaacacggcgatctttttaaaatgagcgggctgaagattactctccccgcgccgtgcgcgttcatcctctcccgcctacacgaaaacggttttgaggcctacgccgtcggcgggtgcgtgcgcgacagcttactgcacaaaacgccgcacgattgggacatcacgaccgcggcaaagccggaaaaaatcatcgagcttttttccgacattcccgttttagagaccggccttaagcacggcacggtgacgctgctcatcgaccacgaaccgtacgaggtaacgacgtttcgcgtagacggaaattacacagacggccgtcacccggacagcgttgcattcacgaccgatattcgggatgaccttgcgcggcgcgacctgacgatcaacgccatggcctacagccccgcaaccggaatcatcgatccgttcggcgggcaggaagacctgaaaaacgaagtcattcgttgcgtgggcgacccgcacaagcgcttttcggaagatgcgctgcgcctgatgcgcacgattcgtttcgcggctgtgctcggatttacggtcgaacccgaaacgctgcgcgccgtgcacgacctgcatgaaacgatcgggcgtgtcgcgcaagagcgcattttcacggagcttttaaagaccgtctgcgcaccgcatgccgccgaggcgctgcgtgccgcgccggagttgtttttttgcgccgtgccgcagctcgaaaatctcaagggtgtgccgcaaaacagcaaatatcacatgtatgacgtatgggagcacacgctgcgcgcgctcgaaaatatcggcacagatgaccccatcgcctgccttgcgattttatttcacgatgtcggcaaaaaagccgtccgcacgacgggtgaagacggttatgaccactttttcgggcacgcggagaaaagcgccgcgttcaccgatgaagctctgcgcgcgctgcactgcgacaacaaaacgcgcgaaaacgtcgcggagcttgttttgctgcacgataccgcttttccgaagcgcacggcaaagttccgccgcctgctcgcaaagctcggctatgagcagttctaccgcttgctcgccgtaagccgtgcagacagcttagcgcacgcgccgtggtgcatcgaagaccgctgcaaagcgcttgcgaatgccaaaagcgaagccgaagcgctgcaaaaagcggatttctgcttatctctgcgccaactcaaaatcaccggcaaagacctgcaagcgtttggctttcagggcaaagcaatcggcgaaaccctaaacaaactcttagacgctgtgctgtgcggccagcttccgaatgaccgcgaagtcttgcttttgcaccttgaacggtacacacaaaaacacaaataaagtgcaaaccgcgccgctcggagcttttccgaaacggcgcggtttttttcggcctttacttatatgtatcgtaaaggccgaagctgataccgatggcttcgttgacgcgctgcatggcgtcgtcatcgagcttgcccattttttcttttaaacggtgcttatcaatggtgcggacctgctccaaaagcacaatggaatccttttgcaggccggtgcgctcagcatggagcgcaatgtgcgtgggcaggtttgttttgtcgcgctggctcgtgatggccgccgcgatcaccgtgggactgaaccggttgcccacatcgttctgcacaataagcacggggcgcacgccgccctgctcgctgcccaccacggggcttaaatctgcgtagtaaatatcgcctctgtgtacattcacggttttcacactccgaacagaatttgcatcaacgcccgcgacgctacttatattcttgcccgttttttcggcgcttaaacacgcctgttccattctattacaaagttgtgtgttccgtgcaaaatgcgcaggatttatttgccctcgatctgcaaaaagacctgcggcaatttttcgatgaggtctgtcggcaacataccatgctgcgaaagcgcttcggcgcaaaggtcacccgccgcaccgtgaatgcacacggcggaatatgccgcttcaaacggctgcatattctgcgcgcacagcgcacctgtgatgcctgccaaaacatcgccgctgccgccctttgccatgccggggttgcccgttgtgttcacacgcgtttcaccgctcggcgctgcgataattgtacccgcaccctttagcacggtgataacgcggtacgtctgtgcaaagacacgtgcagtctgcaaacggtcggcacgcagctctgccatggtgcggccgtttagacggcacatttcccccgggtgcggcgtgatgatgaccggggcttgcggcacaagtagtttttccggcgttttggcaaggatattcagcgcgtccgcatccagaacgaccgtcccgtgcgcattttcgagtacggcatccacaagctttgtcgcatacggcgccgtgccgagcccgcagcccacaaggcacgcactcgccttatcgatagcgtcgagcaccgcttcgcccggcgcttccgtgggatcatacagcgtgaagattgcctccggcacggcgggagccaagattgggtacagcgcatgcggaatggcgatgttcaaaatgcccacaccgctgcgcagcgccgcacgcgcagccatgatgcatgcacctgccatgcccacgctgccgcagatcattaaaagccgcccgtatgtgcccttgtgcccctccgggtcgcgcttcgggaacagcgggcaaatgttgccgagcaaaacagattccgtgtcacacggcagcatctcaaggtgctcctccttgatgcccacctgacgcacaacggtcatgccgccgaagcccgctgccgggtacacaacgcccgccggcttcatcgccgtaaacgtcaccgtaaggtctgccttaaagcacgcgccctccaccgcgccggtatcacacaccgcgccgcttggaatatccacggaaatgtgaaacgcttttttattttccgctgcgcgcgcaaacaaaggctccatcacgctcggcagacggccgtgaaaactgaagccaaacaccgcatcgatgatgacgtccgccgcgtctaccgcgccgcctgccgtgcggtacatgatgatctcaatgccgcggcccattttgtcatacgcctgctttgcaagatcggaggccggtgcgccctgcatcaaaacgaccgtcaccttcgcgccctcggccgccaataagcgcgccgccacaaagccgtcgccgccgttgttgcctttgccgcacaaaatgaccgttttcttgcctgtgacgtccattttctctgtcactgctgccgccaccgcggcgcccgcgttctccataagcgtttccatggaaacgccggattccaccgcgcatgactccagccctctgatctctgccgctgtcaatacccgcatatacctgcctcttttccgtagcattctatgctttaatggtatcattttcccgtgcggttttcaactatggaagcggtgaaaattaaaatcattttcgcgccgcacggaaaagcgccccgtcaccggaaaatctccgataacggggcgcttcacattttgaatttagtttctgccgaagatttcaaactttaatcttctgtccataaacggcttgatggcatcgatgcagcgctcgtccggcgagaacacaagaagcgtcaagccggtcttgcggctctttgcaatgatgtaccacgcgtccttgccgtcgtccgtctccgccgcgaaaatggtcttgtccacacgcttaccttttaacttctgcgcattctccgtgtacttacccatctcttcaatcgccttggcatcgaaagacgtgagacgtttacggcttctgcggttgatgatcttatctaccgcaatgtcgccgttcgtgatgctgtactcaaactccagactgcgcgaggagatgacgtagtacacgccataaatcacgccgcagatcacgaggaacgggatcatcggcgaaaccggcgtcaggaaaatgctgacaaaaatcaagatcgcgccgaggatcgacacgccgagcgacatcaaaacatccttgctgccggtcttctttttcaccatgtattccacaaacacatctgtcatcatactgtaaattaccttccgtttccataattcaatattgtcattgtaccataacccacacggaagttcaactgcgtaatttgtgaatttttatcgaatattacgaataccgtgcgataacctcaaaactctgtccataaaatcccgcgaaaggcttgaaaaccgaaaatttctatgctaaaataacagtgttgcgtcgcgaggatacaaacgacgccgaacagtgaaacgcgatgaaaaagaaaagtagcctgtttttcgtgggcagagagggtgcgccgtcggctgaaaacgcacctgcattgagtataggtgaagttctctttggagcggtgcggctgaaattaaagtaggctgcaacgggtagctgcgttaaaggctttcagagggcgcaatgcgccgaaattgggtggtaccgcgagcgttccggctcgccccatgttttgtgcatggggcgggcttttttcatgctcaccgttcggtacaaaacggaaatcatttatgaaaggatatattgatatgggaatcaaagaaagcatttccgagctgcgccagaagtttgacgcagacctttccgaagtgcgcgacagcgaatccatcgaaaagctgcgcgtttcgtatctcggcaaaaaaggctctgtcaccgagcttttaaagggccttaaagacctttccggcgcggagaaaaaagaattcggccagaccatcaacacgctcaagcgcgaggtcgacgaacgcatcacagcacacgtggagcgcatccggcaggaggaggaagaccgccttgtcaacagcgcagagcaatatgatgtcacgctgccgatggataccgactgcggctcctatcaccccatcacgctcgtgcagcgcgagctggaagaaattttcgcttccatgggctttacgattgaagactaccgcgaggtcgtaacggattacaactgctttgaggcattgaacattccgaagcatcaccccgcccgcgacatgcaggacacctactatctcgataacggtcagctgttgaagacccacacctcggccgcgcagaacaccatcatgaaaaagtacggtgcaccgctgcgtgccatcttcccgggtcgctgcttccgcaacgaaagcacagacgcttcccacgagaacacgtttttccagatggaaggcatcatgattgataaagacatctccatttcgaacctcatctacttcatgaagaccatgctttctaaggtctttaagcaggacgtacaggttcgcctgcgcccgggcttcttcccgttcgttgagccgggctttgagcttgacatcagctgccacatctgcggcggcaagggctgctccacctgccacggttccggctggattgagctttgcccgtgcggtatgattcacccgaacgtgttgcgcgccggcggcatcgaccccgatgaatacaccggcttcgcgtttggtctcggccttacccgccttgccatgatgcgctacggcatcaaagatatccgcgacctcaacagcggcaatctgaaggtgctctcgcagttcaaccacgaataagaaaaggagtcgttataatgctgatttcaatgaactggatcaacgacttcgttgatctttccggtctggaccttgaaaagctgattcaccaattcacgctttccactgcagaggtcgaagacatctattatatgggccgcgacatcaaagatgttgttgttgcgcgtatcgttttcatcgaaaaccacccggattccaaaaaactgcacctcttgaaggttgatgcaggcgacaaggtttatgactgcgtatgcggcgcaccaaacgtgcgcgagggcatgcttgttgcctttgcccgcgaaggcggctccgtttccggcatggagatcacctgcgcaaaaattgcaggctatgaatcgcacggcatgtgctgctccgaaaaagaacttggcatcagcgccgaccacagcggactgtgggagatcacggatgacctgccgctcggcacacagattacggacgcgtacggcgtaaaggacgttgtgttcgaggtcgataataagtctctgacgaaccgcccggacctttggggtcactacggcatcgcgcgcgaatttgcagcgctgaccaatcgcgaattaaagccggtcagccgcatggatctcaccccctacgcttctctgccgggcatcgatatcgatatccgcgataaagagctctgctaccgctacacgggcctcaaggtgcgcaacatcacgaagaaggtcagcccggttgatatgcgcattcgtctcttttactgcggcatgcgtgccatcaacctgcttgccgacctcacaaactacctcatgctcgagctcggccagccgatgcacgcgttcgactgcgcaaaggtcgattccattcaggtgcagcgcttctccgctccgttcgagtttgaaacgctggacggcacaaagcgccgcatcgacgaaaacacgctgatgatctgctccaaggaagaaccggtcgccatcgcgggcatcatgggcggtctcaactccgagattgaagataacacggacagtctgctgctcgaatccgcaaactttgacgctgtaagcgtgcgcaagtcctccacgcgcatcggtttgcgcacggatgcttccatgcgttatgagaagacccttgacccggaaatgaccgacgtcgccatcgagcacttcatgcagctgctcaccgagatcgacccgagtgtggagatcatctcctccatgacagacgtctatgtccgccactacgacaaaatcgacatcacgttcgataagaaatttgtagaccgttatacgggcatcgatatttccgacgaacagattttgaatacgctttccgcgctcggcttcgcaccgacgcttgaaaacgaagtcttcaccgcgcacgtgccgtcctggcgtgcaacgaaggatgtcaccatcaaggccgacatcatcgaggagatcacccgtgtttacggctacgataacttcaagattacgaccacaaaggcagctttggcgccggtcatgcgcaccgcgggcaacaatgatgaccgctggacgaaagacctgctcgtacagcgctacggcatgcacgaagtgcactcctacatctggtgcgacgcgaagaagtacaaggacctcaacatcgagattgaggacaacgtgcgcgtcatcaacgccatgacgccggaccacaccgtgctgcgccgctccatggtgccgacgatgatcacctacgtcaacgaaaacaaagcatacgcaaacgatttcggtgtgttcgagattgcccgcgtcatcaacggcctcggcgaagacggtctgtgcgatgagcagaagcacctcggcattgcgctgtacagccgcactaagagcgaaaaggacctctacctcggcctgcgcgacatcatggcttccatcagcaaagagctgaagcaccgttactttgagttccgcatcgcggaagcaaagcacaactggcagcacccgcgcaacactgcagagatctatctcgacggcacatacgtcggctttatcacggtcgtacatccgtccgtacagtcgaagatcgataagaaagccgtcatcgttgccggcgaactgaacatggatacgctctcctccatggcagcatccgttattcactatgaggagccgtccaagttcccgggcatcgatatcgacctctctctcgtcatcggcgcagaccagacgtacagcacgctttccgccgcatggcagaacgtcacccctctgctcaagaacgttgcgcttatcgattcctacaacggcgtcgtcaagagcatcacgctgcgctttacgttctcctcgaacgagaaaacgctcgcgaagaacgaggtgcaaagctatgttgacaccatcatcgagaacctcgcgaagattggcgttgtgctgagataatttgttaaaaattttcgtaccgcttgctttttttgttgttttgcggtatgctgtatacagtgtttattccactgtgcttttatatgcgaataaaacaccgggcccggcatacaatgaaatgtagactgtatttttgcagcctttacacgatcggaaaacgaggaggtgttccacatggcagaagatttcagcgaccgcacccagacattcagcattgagacgccgcagaagctcgatatgcagcaggtgctcgtacaggtttacgatgcactcaaagaaaaaggctataaccccatcagtcagatcgtgggatatattctctcggaagatcccacatacatcaccacgcacaacaacgcacgcagcctcatccgcaagatcgaccgcgatgagctgctgaaagcaatggtgcgtacctatttgggcgaataagcctgttttctgatgcgccgtcgctttatgcacggcattgcctgaaaccgaaattgccgcttggcggatttttccgtcggcggcaatttttattttcaaatgtgcaaatacaagttgtcttttttcttaatctatgctatactgattaaaagtgtattgaatgctttgcaccggtgcttagaaagttccggcattttccccaacgagactttatgaaaggatttgcatactatgagcgaaaagcagaagagcccgtttcctatgtaccgcggcaagccccttgtgcgtagcggcgataccatttactacggaaacatgaccgataaatacgtcatcaagatcgacatcaaaacgaagaagaccgtggaggacatggaggttgccgataagtgcactgtgcagctcatgctcaccgacccggagattcgctccagaaaacagatcgtaaagaccagcgagaagaacggcctttatcttgctttggacatcgccgatgcctggcttacccgcgcattgacagaataagccgttaattccgcaaaaaaatcaccgaggaaaccgtttgtccggtttatctcggtgattttttgctttattctttccttctcggctgcttgccgtgcttttctttgcgctgacgtttgttttggtacatggcaatatccgctttttcgagcatttcgtcatacggcgcggcaacttcatctatgaaacagcagcccatggagaaccgcagcggcacatgatgtccatcgtgcagcacggcttcggagctgtcctgcgcacttttaagctgaagaagcttttcttgcagcgcttcttcgcttttttcttcgaggaacaggacaaattcatcgccgccgtgacgtgcagtaaggccgctttcacccacgatcttttttaagatttctgctgcggaaatgatatattggtcgccgctctcgtgcccgtaggtgtcgttgacctctttcaagtcgtcaaggtcgatcatcaccacggcgtaagtatcgcctgtacccgcttccaaaatgcgctccacacggcggctcaggccgcggcggttataaagtcgggtcaacggatcggtgtcacgctcagattcgatctgtatgcggcgctgcatctcctccgtcacgtcgttcaccacgccgaaaacactgctctcctcgtgcgtttcctccagctttatgtagcggtccggctcgcccggaatgcggtatacgttgcgctcgccgaccacgcggctgcggcgcagctcctcgatgaatgtatacagatgcacgcggtcaccggtgtagtacgccgtctcctcatccgtccatccaaaaatctgtgggatacgctccgtgcaatacacctgctgcacgccgtcacggtactcgtacacgccgatgttcatttccgtgcggctcaaaacgtatgacattttgcggtcgttgttgacaaggctgccgaccatctcgttgatgtatcggctgagcgcagaaaactcccggctgctctgcacgttgactttttcctccaaattgccttgcgtgatgcgattgagcttgccgtttatgcggtgaatgtcatgaataacgtaccgattcacgcagttcgcgacgaaaaccgtcaacgtaccgcagattaaaaccagacatagcgccagattcaaaagatcaagcggaatacgttcgtacaatacgtccatcggaatgatgaaacccatgtaacgggtttctatcttcttaaaaatgcagtagtagtattttccctcaatatttgcgtgaaagccgtgctcctcattttgcatgctctcggcagaaataccgaggtttgccacggtcttccccaccatatccgcattcgttgcgccgatgaccgacagcgtttcactgtctacggcacagtaatcgatcgccgggctgatattgagctgatgaaaaatatacgaaatctcgtttttctccatagcctccgttacaagctgcgggtctttgcccacctgcacgatgaatgtgccgtctgcgctccacacggcggaatactgcatgtttttgccctcagcggtgttcgggccggcatcctgcacaagctgcaaggatttatccgtgagcatcggcgcaaaaaacgccatctgctcaccggatgaaaacgaatagccgtaatactccggatttgtgccggaaacaatcgtgccggtctcatcaaaaatatgaatttcatcaagctccagcagattcgcatatttttcagctttaaggtatcgtttgttgcctccgggtctttttgcagcagaaaggcaatggcttcggcatcatgcaaacaggtcttatcgtatttttccttgacctgcttcagttcattctcattttcttcgataatctgctccagacgcacaaatgtaccggcagcggtgtcttccacgcggccctgttcaatcagaatttccgcaaaggcgattaccacaaggatcactaaagccatcacgattgccgcagaacgaatatagcgattgataatttgcttcagagatttcataggttcaccgccgtttcatttaagtttgaataaaactaaattggttttgagtactgtatttgaaatcaagtatatcacatatatcgtattttgtccagaaatacaaagcgaaacaacaaatttcacttgttttttgcatgaattgacgtgtttcgcaaggatagcgcaaaagcatcagccatcgttttaaggatctcccgcccattatgcaaacaacgcttgaatttttgtaaaaagcgcaccgcccacccgtaaagcacggacaagcggtgcgccaaaaattgatatttagctttctgtacgcttcaaattgctttcgccgaaatgcagcagtttttctttatgaatgaagtagtacaccacgcctgtaacatccgcgagaaaccatccgatcggcaccgaccaccagatgcctgtaacaccgatgatagcggataaaagatatgccagcaccacgcgcgtaccgagcgagatgaccgtcagcaccacgctcataccgggctttgcgaccgcgcggtacagcccgtagagcaggaataagcagccaatgccgcagtagaacgcgccctcaatgtgcaggtagcgcacgccctcggcgataatctccgtttcgcccgcttccacaaacaatagcataagcggctttgcgaacacgaacaccaaggcggacacaatcacgcaaaacacaacggatacaagaaccgcgcctttcaatcccttgcggatgcgttcctgcttgcccgcaccgtaattctgcgcgatgaatgtggagaacgcgttgccgaagtcctgcacaggcatatacgcgaatgcgtcaatcttcaccgccgccgcaaacgccgccattaccgccgcgccgaagctgttcacaagcccctgcaccatcaaaatgccgaggttcatcacggactgctgcacgcaagtcaaaatggaatacccggcaatctcccggatacggctcgcgtggatgggcgagcggctgcacagcgcgcgcaactgcggacatttgatgagcgcgcagaccatgatgccgatgccggaaacatactgcgcgatgaccgtggcccccgccgcacccgcaacgccaaagttgaggccgatgacgaaccacaagtcgagcgcgatattcaaaaccgccgagaccgccaaaaacacgagcggcacgacggaattacccaccgcgcgcagataagacgcgaagtaattatataaaaacgttgcgaaaatgcccgcgaatacgattgcgatatacgcacgcatatcgtcccaaacgtcgtccggcacctgcaaaaagctcttaatgaggtcaagacacgcaaatgcgagaccgtttaaaagcagcgtcacgcctaaaatgagcacgaacgaagcccgtacactttcttttaaggcagtttcatcgcgctgcccgaagcggatggaaaacagcgcaccgctgcccatgcacagcccaagcaagatcgatgttaaaaatgtcatcagcgaaaacgacgagccgaccgccgccagcgccgttttgccgaggaagcgtcctacaatgagcgtgtccgcaatgttgtagcactgctgcaataaattgccgaggatcatcggcagcgcaaaccacagcatagaccgcatcaccggcccccgggtcagatctttgttcatattaaaacctccgcagcgagttttatacatcaaaaaagcccgacacaaaagtgtcaggcttttggtgccggcgaccggatttgaaccggtacgatgtttccatcgagggattttaagtcccttgcgtctgccgatttcgccacgccggcttaaattatcttaattataatagcacatcccggctataaaatcaagccattttattccggcatttcatatttttctgttcagccgcgtaaaaaggcatccccccggctaagccgggtactcggaaaccctaaaaaggcatattacggacaacgcggtctgcttggccatttcctttgctccattcataacgtcgttatgaaatatatatccgtaaaatcaaatgtcaataggcgaattggaaaacgtacacgcaagcccgaattctgcgctttcgctctccttccattgcccacaaaaggctgatttcacaaaaatcgcaaatttttcaactttttgcatttacaaacatgcgctttatattgtatactatgataaaagaccgggcgcaaggcgtgccggaatattccatctataaggagttcgtattatgtactatcttggtgttgacgtaggcggcacaaacattgccgtcggtatcgtagacgaaaacaacgcgatcatcgcaaaggcttcccatccgacgcccgttccgtgctcggaagacgcattctgcgatgcgattctcgctgtatgcaacgatgcactggcaaaggccggcctgaccctcgacgatgtaccgtggatcggcatcggctgcccgggcaccgttaaccgtgctaccggcatcattgaatttgctaacaacctctatttcaagaacttcaagctccgcgacatgatggcagagcgcacaaacggcaagctcgtcattctggagaatgacgctaacgcagcagcttacggcgaatatcaggcaggcgcacttgcaggcgcagacaatgcactggctatcacacttggcacaggcgtcggcggcggcattatcatcaacggcaaggtctactccggcagcaactttgccggcggcgagctcggccacaccgtcatcgttgttgacggtcgtccctgcacttgcggcagacacggttgctgggagacctatgcttccgcaacgggtctcatcaaaaccacaaaagagcacatgaaagatgccccgaaggactctccaatctggacaattgttgacggcgacgagtccaaggttaacggcagaaccgcatttgacgctatgcgcgcaggcgacccggtcggcaaggctgttgttgacgagtacatcaagtacctctccgtcggcctcaccgatatgatcaacatcttccagccggctatcctctgcatcggcggcggtatctgcaacgagggtgaaacgcttctcgctccggtcagagcattcatcgatagagagcagtatgctatgaactccacgaagaagacgaaggtctgcaaggcgcagctcggcaacgacgccggcatcatcggcgctgcactgctcggtaagcaggaggactgattttcccatgtctcttacaaaatccgtgttcggcacgttcccctgcgggaaaacggctgacgcttatacgctgaaaaacgcgtcaggcgtgacgcttgtgctcacaaactacggttgccgcattttacagcttttaacaccggacaagtccggtaagctcggcgatgtcgtgcttggccacgccacgctcgaggaatacttcggctccgactttcagggcacgttcgtcggccgctacgcaaaccgcatcggcggcgcaacgctcaccattgacggcgtaacgtatgcactcgatcaaaacgacggcgcaaacacgctgcacggcggcacaaaaggctaccatcaagtactgtttgatgtgaaagagacgaacgacggcgacgaaccgtctgtcacgttcacacatgtcagcccggacggcgacgaaaattaccccggcacactgaccgttgaagtgcagtacactttgacagccgacaacgccgtggagattacctaccgcggcaagaccgaccgtaagacagtgttcaacccgacgaaccactcgttcttcaacctgaaagccgacggctccaaggacgtgctttccacgcttgtgacgattcacgcgtctgaggtaacggcggtcacagatgacctcattcccaccggcgagttgctgcccgtaaaaggcacgccgcttgatttcacggctgcaaagccgctcgggcaggatatgttcgcggatgaccacctcatccagctctgcggcggtttcgaccacaacttctgtgtggacggcgagggcatgcgcgagattgcaatagcctacgagccggagaccggccgcgaaatgaccgtctattccgatatgcccggcgtgcagctgtatacgttcaatggcacttccggcctgaagaacaaagacggcagcgacatgatcccccacggggcactgtgccttgagacacagttctacccggattccgtgcatcacgagaacttcccgttccgctatgtcacgccggagaaaccgttcgagtccaaaacaatctataaattcactgtgaaataatgtgggagggctgccgcagggcggccctttccgatttcatcgcctgcggttttccgcggcaaattgcaaggaggtcattttttgaaaaaagaaatttcctgcggcgcggtcattgcgcggcaaaccgaaaacggacgtgaaattctgctcatccgccatgtaaacggcggtcattgggcgtttccgaaaggccatatggagggcaatgagaccgaaagcgaaaccgccttgcgcgagatccgcgaggagaccggccttacagtcacgcttgataccggctttcgcgctgtcgtcacttactccccgaagccgggcgtcatgaaagatgtcatctactttgcagccgaatacatcggcggcgaagcgcaccggcaggtagaggaagtcaccgagctctgctgggtaccggcagaagaagctgcggcgcacatcacgtttgaaaacgataaagatgtgctgaggaagtacagagaatattgcaaaacataagaaaagagcgtgcaaactttcatctgcacgctcttttcttatgctcatgtagctttaagcgaaattacttaacgatctcgccctcaacggtgccgccgagtgccgctgcgttggactcatcggtgtcgatgtgcatagcagccgcatacttcgggctgacacgcacaacaacgtcgccgaaaatcacgctgcgctcgccttccttgccgaccttaacggagacgatctgcttgtcttccacaccggctgccgctgcctcttccacgttgaagtggatgtggcgctttgctgcgatgacgcccttttcaatgacgacttcgcctgccgggcccttcagcgtacatcccggggtgccctcaaggtcgccggactcacggatcggtgctgcaataccgagcttgcgtgcgtcggtcagtgcaacttcaacctgcgtctccgggcgcgtcgggccaaggatggacataacaagggaacccttcgggccgatgacctctaccttctcgttggaagcgtactggccgggctgagagagttctttcttaacggtaagctttgcgtctgcgccaaaaagcgtcttcagatccgcttcggacacgtgaacgtgacgtgcggaggtttcaaccataactttcatttgaaaatacctgtcctttccggattttgtatttctattttactacgaaccgacagaaaatacaagttttgggctatgttttttctccgatttatgataaacttaatgcagaaaagaccgtaatttgaaaaaacgcgaaaagtcggtgtgaaatatgtttgaaaactgggaagaattgaaagaaaactgcctgaactgccgcaagtgcaacttgtgcgaagcgcgctccaatgtcgtgttcggcgtgggtaacccgtgcgcgaaggtcatgttcatcggtgaaggcccgggccgaaacgaagatttgcagggcgagccgttcgtcggtgctggcggtcagctgctcgataaatacctcgccgccgtcgacctcgaccgccgcacgaatatctacattgcaaatatcgtcaaatgccgtccgccgcaaaaccgcgatcccttgcaggaggaacaggaagcctgcatggactggctgcgcaatcaaaccgccctgctgcgtccgaagatcatcgtatgcctcggccgcatcgccgccatgcgcatcatcaaacccgatttcaagatcacacgcgagcacggacagtttttcaaaaaaggcaacatctacatgacggcaaccctccaccctgccgccctgctgcgcaatcccgcacaaaagcccgccgcgttcgacgactttttaaagctccgcgataagatcgacgagcttcaggcagatatctccaaaacatattaaacatacaaaagctgctccgtttttatgcggaacagcttttttcgttttaattataaacttgcatgaaccttacagcagctttgcgcggagcgcttcgccgctttccgggtggagatacgccggagcaacgtcaaagacggtcttgcagcccacctgaccttcactgtgcatgcggtatgccgcgcgggcaaacgctacgagcacactggaagtgaactccgggttggaatcaagcgtcagcttatactcgatgatgtgcttgttttcgccattcaggcccgtcacaccggtgcggaacaccataccgccgtgcggaatgcctgaatggtcgcggtcaagctcttcctggctgatgaagtgtacggtcgtgtcgtaatcggagaaatagttcggcatcgtgacgatggcttcctcaatggcagccttgtccgcaccctctttggcaacgacaaagcactctcgggtgtgcttctcgcgcgtcgtcagctccgggttctcgccgcggcgcacgctttcaagcgcgctctccaccgggatagtatactggcgggcatcctgtacgccgggaatgcggcgaatcgcatcggagtgaccctggctgacacccttgccccagaacgtgtagtctttgccgttcggcaaaatcgcctgaccatagaggcggttcagagagaacatacccgggtcccaaccgacggaaatcatgccgaggtggccgctcttcttgcaggccgcgtctacgtccgcaaaatgctccgggatcttcgcgtgcgtgtcaaagctgtcgatgacattaaaatactgtgcaagctctgcggtttgcttcggcaggtcgttcgcgctgccgccgcacaggatcatgacgtcaatcttatccgtcatgttttttgcctgctccatagaataaaccggcacgccggtcttcgtcttcacactgtccgggctgcggcgtgtgaaaacgcccacaagctccatatcttccgtgtgggaaagcgcactttccacgccgcggccaagatttccgtatccggcaatgccgattctaatcatttttatcgctccttcatgtatctttcaaaatcataacagcgcaagttagtttacactacgatttcaatttctttatctattatacgcaaacgcacgatattttgcaagagaaaatgcaggaaaacttgaaaaagccgtcacaaagcagctgttttctgtcttgtaacggcttttgtctttttagttttaacgcaaaatcagcgaatgttatacacgctgcgcatatgaataccgttcgcgtcgccgctcacaatgcggatgcggcgctctttatcggcttcgaggtcgaagtagttgtcttcaagcacccagtcctcgttctcgttcagtacttccacgctcttcgcgtatgcctttgcggaaacgataatctcatcgccctccacacggcaggaaagctgcgggtcgatgtaatcgtaatacttcggcacggagaacagcacggtggattcggagatcatctcgccgttctggtagcacgcatagtgcacgtggtcggtgaacatgttcgcttccggcagttctacggtatcgagccacacggtgtccattgcgggcacggtgatttccacctcgccgccgtcgcgcagaacctcggagcggttattgcgcagttcccacttcacggtgaccgtctgcttcacgtatgtgctgatgatgcggccgccgttccgccgcaaagcataatgtcgcgccaataggggtcttccatgcgacccgcgttcagcaggtcattgtacacggagcccggcacggtcgcgggaatcgtgtcattttttccgacggtcgtcagctgccagccggaatgtaaaagctgttttttcatttcttttatcctctcattttatccgtcaaaacgcgcgaatttctttcttcactttcgttttaatcggtctatatgcagtatagcaccggttccacaaattgtaaagcgactgctgctcctttattccggtaaagcaaaaaattcgcaaaataccgaaaactccatcaatttttcgtgtagttttcaggttaaaaagtgcaatatccttattctaaataaaccgatttatagaactccccatcgcccatgtgtccgtcaatcgcacgccaacgcagcctagctgcacatatgatcgtcccgtcatagtcctctatgtcatcttccgatacattttgtccatcgcaccaatagatgtccctatcctttatcagtagcgttgaaccaaaaatctcacaagtatattgctcatccacaggagataaattcagatatttcagtcctgcaaattccatctcgatcatcgaaacatcttcgaattggcgctgaataattacattcaatacccgacgatcatttaacggatacattctcaaatccgcatctacagatgctccgcttacataatgcatctctttaatacagctatcgtgaagcgcatagactttatccataaaatctctaatatcctgttcactgcgaatttcattccacatagataacacctttcaacagaatacagccattaccttgccgtacctaaattcaactatttcagtctgctcgccgcttccgatatctttttccaccttaagtactcactttttatgcggtcatgggatttattagccgccgggcacaagtttatcggatctttcaaattaaatatatccgctaactttttaaacgcgctgctattagcaacatcttccatacagctttcacattcgttcaaaagcttttcagggtatttctttaaaatgacagccgccgccccgtaccgatcatctctgtttttgccatacaagacgagctccagcagcgtatcaaaacccgggagcggttctttataaaacccgttttcttttccccaaccgaagtcatacagcttgcatttgccccataaagtatgatctttcgggttcgtcgctctttttgcatccaattgctccaaaccaaaatccgaagcttcgcatttatcaagcctcgtgctcataacaaaatgttcgcccatcgtcgtatctccactgtctgttcatgcacttttccaaagcaaattgaactctttttcagtctcatcatatcatattcgcctgcactgcacaagcaaaatattcccggatataacaaaaaagcacctacaaacgtaagtgctttttctctggaggtgacacccggatttgaaccggggaatcagggttttgcagacccacgccttaccacttggctatgtcaccattttgaaaaagacgccttaacttcagcgtctttttcttttggagcggacgacgaggctcgaactcgctacctccaccttggcaaggtggcgctctaccagatgagctacgtccgcatatggtgcctccgatcggaatcgaaccaatgacacggggattttcagtcccctgctctaccaactgagctacagaggcaaatgtggcgacccggaacgggctcgaaccgtcgacctctagcgtgacaggctagcgttctaaccagctgaactaccgggccacatttggtggggacaataggactcgaacctatgaccccctgcttgtaaggcaggtgcttcgttttgtgggattgctgttgtcgttttataaatttgaataaaagcaagcaagatacaaataatattgacaatttgcttgacaatgtataccaaacagtatatacttttcattgaaaggtagtgattatatggcaactgcacctactcaaattcgtattgattctgatgtaaaaaaacaagcaaatgatttatttagccatctggggcttgatatgtcaagtgcagtaaacatttttctccatcaatgcattcttcgtggcggtcttccgtttagtgttgaaatgccacaattcaatcaaaaaacactggatgccatggaagaagctaaacgcatttctcaaaaccccaacattgaagggtacgagaccatggatgaattgagaaaggcattggaagattaagtgtatacagttaaatttaccaatgcttataaaaagagttataagcttatgaaaaagcgtggtttagacttgtcgttccttgatgaagttgtcgatacactacgtcaaggtaagcaactcgactcaaaatatcgggatcatggatgtggatacaggttcccattccgatattttgaaaatttaatctctcatcattaaagcagaactccacatgagctctgctttttccatttagccaaaaaccggaagtacttccggttttttatattttacccgtatagcaatgcggagactttattacaggaggacatttacatgtcaattaaaattgctatcacaaacgaaaaaggcggctgcggaaaaaccacaagtgccgtcaacatttcggccatcctcgccgaacgcggctaccgtgtgttgcttgcggacgttgatccgcagagctacgcaaccatgtactatggtctgtataatgccgatgatccgtccttatatgacgccatcaccggtgtttggccggtgaatgacgccatagtaaaaaccgtttttggtgtggatgtattgaaatcgaacactaaatcgatgaggctcgaagaaatgctcacagaatataaacttcgcggcagagcatacaacgatttactctctaagctccttacaccgattgagaacaactacgattacattattatagattgtccgccgcaaggctataagcttctcgaaaacgtacagcgctatgcagattacatcttgatcccgatgatcccggacgaatttgcactgcacagcttacgcatcaaagccgaaagtcttattgaaattcgcagaacgatcaatccgcacctccggttacttggcggcttaattatcatggatgaaaaaaatggaacaaaagccatttaccgcgacgccctgcaatcgcaagacgtcattccttttttcagcgcaaccgtgcgtaagaacatcactttgagccgcgccatcaacgcgcacgagcctatcaatacatatgcaaagcactgcaacggtaatatcgattaccaagcggtcgtaaacgaaatcatcgggagggtcgagaaatgaaaaagctaaatcttggaaacatcaatgccggtttgagcaccattaaggaactggccaacgaaaatgccggtattgcacgtgatgagctgatcgacgtctccttgatcgactttgcaaacaaaaacacatacgccgcaaacgacacggatgacagcatccgcgacttagcagatcaaattgaaaccgtcggtttgctgaatcctctcggcgtgatccagtccggcaatcgttacaagctgttttccggtgaacgcagataccgagccatcacacagtacctacactgggacaaaatcccgtgcagaatttttgaaggcgtttcggccggacgtgcgcagctcatgctgcacattgcaaacggcggtcgtaattataccgccgaacagaagctcgccctatacgaagaatacagagcgcttctggacgaattgaaagcttccggcgaattcaaaggcggcatacaaaagggcgtcgccgaactgatgcacgtctctgaccggcaagtccgcacctaccgcacaatgtcggaacagcttaccgagcccgaaaaggttgatcttgctgccggaacgctcaaatttggcgaagcacagaatatcgcagtcgagcgagccgccaaagcaacgcagccgacagtagcaaacgccacaaaaagcggaagtacttccgctttttcgagcaagaccgaaagcacaaagagctctctaagcccggaaatgcgcgaagacctgctccgcaaagtcatcatgagtgggtatatttggaactgcgaagatctgttagattattatgttgagatgatgcctacaccgcaggaagccgtgaaagatatattaaaacccaaatacggctatcatggcggcactttaattatgaagcattttaatggcagttatgaatgcacatcatcaaagcttattttacaaaacggtgcaatgcagacgattgcagcctacacctataacgaggcagacaccatgatccgcaagctgtaccgagacggagagctttgcccggaaaggcaggatgcaaaatgagagttacaaaagtcgatgttactattccgagcagtggctattaccttggctacgtcagtctggttctggataatgcgtacaccttaaacggtgtgcgcatcaccagacgagcagacggtgggttacaagtcttatatccgcatttggccgaacgcgaaggcaagcgccgccaaatctttgcttttaagccaatgaaccccatagcacacaaacgcatcgaacaagctgtgctatccgcatataaagaagaactgagaaaaaccggaagtacttccggtttttgaacttttgaagaattgtatatactcttttgatagattttcataaaatacagaaaagtacttaaaaacatataggatgaggtctctaaatgaacactaagcgttacaccctatctgatgcgcacagcacgcagttttatcaactcccgaaatggcttgtggcgcttcgcgtagaggcagaaatcagcaacgaagcaatcctactgtatacttacttgcgagatcgcgtacagctgagcattacaaataagtggatcgacgataacggtgaagcttacctctactttaagcgtgaacaaatggaaaaactgcttgggtgcaaaaaggataaagtgcaaaaaattattaaggagctcaaatccgtaaacctgctcgatgaagtccggcaagggttaaatcagccaaatcgcctctacctgcgctaccccgataattctgaactcatagaaatgagcattgatttcgagaatgaagacgaagaagactgtgagcaagagcctgaaagtcctgaaaaacccagtgattatgcggagcgcggaaaaaccgcactccggagtactgaaattccgcagtccggacttctgaaaaaccgcactccggactgcggaaaaaccgaagtcaagagtgcggaaatatcgcagtcaagagtactgaaaaaccgcagtcttgacttctgtaaaaccgcacctaataagactgagtataataagactgagtataataagacagacagtcagagcgacggcaattttgattttttgatgaatgcagatgttccggaggatttcgcgaaagcctgcatctctttgatctgcgaaattactactactcccttatcgactgttcgcatcggtaagcaagtgcttccgagcacgcaagtatgccaagcgttgcacagcttaacgccggagcatttgcaggccgtctaccgcataaccaaatattctaacaatgtacggaagcctaaagagtatctgcttgcattgctgtacaacgccgcccaagctgcgccggagagtaatctctacgcgcagttttttgctatgccgccggaagaacacaagccctcgtttgacatcaaactctacgagaaatacgatattttcgattacttaaacgaagaaaggagcccggaacatggaacatgaactcgacgcttatcgcaagcaatgcgctgacatttgtgcggcagtgcccaagaattcgacaaatctcaagccatttcgttgtagtgggcctgattaaacgcaattcttcgaaatatatctttaagccctcttattaaatctataaaatggacttgcactcggttgagtacaagtgtttagtaacccctgaagaattaaattctgcagcgctgttgactttattgcatgaaatggatataatatagatagaatattactatcgtcataattcaaggaggtatcattatgaatattcgtccatccgcagcaattcgccagaactacaatgagattgccgatatgtgcagaaagaccgcagagccggtctttctaaccaagaacggcgagggggatttggtggttatggacatcgggacttacaaccgcagggaaaaaatgctgaagctccgtgaggaattgcttgccgtagaggaggacaggatgcgtggaagcaaaggttactctgttgaagaagtcactgcgatgatgcgtagtgcaatcaaggaggcggcaggtcatggagcagcagaataaataccgtgtgattgtatcggaacgggcaacgcagatgctcatttcccacgccgcatttctggcacaggtcagcccagaagcggcagaacggctcacagccgagtttgaaaagaccgcaaattccttagagctgatgccgcagagatgtccgtggctcacaggggaatatattcccagaaatgcctaccgttttatcctgtttgaaaaacgctatatgataatcttccagatagtagacgatatagtttacgccgattatgtggtggattgcaggcaggattacaattggcttatccggtaacaagaaaataaaccgagcaaaatcgtcactttcatggacttgcactcggttgagtacattggcttaggagaagtgaaacgatgagtataataacactatatcacggtacacctaatgaatttgttacaccgcaatatggttacggtgaagataagcacgactatggaaaaggcttttaccttactgaaaacatagaactcgccaaggaatgggcagtttgtagaccaaccgaaacgaatggctgggttcataaatacgaattagacatttctgatttgaaaatactggattttcaaaaatatgatgttctctcttggcttgctgagttgatgaagcacagagacgcagcggatacaaagcgctataaagttctttctaaaaaattcatagagaagttcggaatcgatacaagcacatacgatgtcataaagggttggagagctaacgcttcatacttttatattgccaaagaatttgtgcgcgacaatgtagatacggacatactcgaagaattgctatcattaggtgggctcggcatccaatattgtattaaatccgaacttgcttattccaaactcacggagaataaagaaggcttgatccgagtcgagtacagcgtgtttaacgataaatacaatcaacgcgatgtacgtgcccgagaaaacatgcacgatctcatcgagtcagatgcaaataaagtaacaaatgtattcagcacattattttagaggtgatatgatgcgagcttatccagaggtatacttacatgatattgttgaaagccaaggaaaactgttcgattttgtatcgcagaattatcctgagaaagatacatcggatttcatcaatacttatatgacaagtaaaacaagagaaagtatcgatcaaggtaaagcctatgttagcaccatgaatgcttccgaattgtgggattactttcagcaaacagaacactatcatctcaaaaacggcaaagcactcaaagggtttattcctgattggataggtgaattttacgcctattatcaatggttctacaacgtctcaagcaaggagattattaaaaaagtgccattggattttttaacaaaagcctacatgggattacacgatttagaacttgatttggccgtaaaaaaggttggtggagcgccatgaaaatcctttgctttcataaccctgacgaagaaaacggatatttgagcaattggtatttatccgaattcaacgtatccaatatcaccttttcctcaatggagcaatttatgatgtatcaaaaagccatgtgcttttgtgaccaaactattgcaaaaaagattttaaccactcatgatgttgctcaaataaaaaaattcgggaggcaagtttctaactataacgaaaaccgttggaatggcatccgacaaatcgttgtatatgagggactgcttgcaaagttttctcaaaacctcaacttaaaagatctcctgaaagctaccggcgacaatcttctcgcagaatgtgccgtcaaagataagatttggggcgtgggcctatcaatgagtgatccagatcgactggacataactaagtggaaaggtcaaaacttattaggctactccttaatgatggtacgcgaaaagatatgaaaataaaacaaagcagcaaaaaggtttgttacctgtacacacaggcagcaaaccttttttcatacagttttttatgaaaggaatgatttatttatgagctataagcctttagaaaatgtcaccatcgtttttagcacagcgaatattaccgtttgtgccgatgagtggggcgatttgtattacacgaccgaaattccggatgaatttgtaaatcagggtgagccgtatccccgctccaaatgcaagccgattattgatctgccacccgaacaatttgatcgtgtgttggcaatttacaaggaattgccggatgacctacttgagcacttgatacgcggagaggagcaagaagatgcctaaaaaaagaacattctactccgaagaagaacgtaaagcacatcacgaaaagaagcaaagagaagcagatttgcagattcaggagctcacaaagcactgggaaaacgatcccaaggacatcgcagaatacctcgcattcagcactcagttttacaaatattcttcacgaaacacaatgctgatctaccggcagcgtcctgattccgtatttattgcctcatacacacattggaaagaacttgggtattatgtgcaggaaggtgagcatggtgctaatatttatcggccggaaaccacgcgctatttcaagccaaacgtgccaaatccaacatgggttcttttatctaaagcctcgccagaacaacgccatgaagttgaaatcggcatgctcgaaagccgtgattttacctatttcaaaccctgcacggtgttcgatatttcgcagacaaattgtccgccagaagactaccccaagctctgcggcgtaggatacaacagtacgcagcacaaagatatttacaacactctttgcctttattctgaagaaatcggcgtgcctgtatccgaagaagattttgaaggaatcggcacacgcggcgcttataacccgcgcaacaagcacatccatattaaccaattactcggcgacacacagaagctcgatacattgttgcacgaaatgtcacaccactttatggggcatagtcctaacatagaaaagcctaccatgcagcgtgaatttgaagccgacggtctctctattatgtttggaaaaacgttcggaattgagcccagtgacgcccgaaaaagccaccttgcagcctgctaccaagagctgcttaaggcacagccggaagtaaaaatcgatgcacttttggcaccggttcgcgaaaaatttcagcagcatattgaggcaatggaacaggaactttctctcgcaggcgtaataccgcagcaaatcatttcttcccaaaaagctgctgaactgaagcgtgaacaggctatgaaaaaggagccaaccgtaaccgttatatggacggaaagcaagcgtctgcacgacggccagactatgcgattatcgcgtgcaaacgaactctttaaagcaatcgataaggcgcagcagaagtacccgaactgctaccacaaagcagcttttcgcattgattatatgctgcacggagaaccgagcagctatgaaggccgacagagtttcggcactggtgaaggcagtctgatcgaccatatcaagcggctaaatacgctgtgcaacgagaaccctcagtgggaaaattacttgttagaaacaggcggcagcgatgcacttttacaggacagacacgaaaaagaatacatcttaaatgagttcattccttacttaaatctgcatgttgcgctttccgaaatcgaacagagcgtttcggaaaagctcggtgaaaccgatgaactcacgctcgaaagaagtgagcaattcgccgccttgcagcaaaatgtgcgtactgtccgtgctatgctgaaccaaggtaattacgatttttccgtggcacaaatcaatgaactctctccaaaattcgcagaatggatgcgtcaaatctcgaaaaaatccattcagcaaagctctgagaatacgcttacaaaagaagaaatcatacacgattttgagcaaatcgcaacacaaaatcgtgcagaaatcaggcaagaacagcatgaagaatttgaaatcacaatgctataaaaccggaagtacttccggtttttcggaggaaaaatggcaaacccggttttaattgcgaagctcgctttggtcgcagccgaccccaaaacatggcaaaaaatcattattgcctgcatctctatttttatcatttccgctgcactgctcggcagctgcggtgcaatgacttttaccgatttaggcttcgactgctcgcagcttttctctgcaaaactgaacgaatacagcgctgtttttgactccggtgcacgcataaatgataagcttctctatgctgtgtacgccaaaatctttgcggataacgaccgattaaagaaccaaaccgatgagctgattgactgctttgtttcagatgataagctctccccgctaaccgattccgatgaaatttttgataaaatcgagcgcacgtttgatctcaaaatcaacgcatacatgcgctcgcaactgctacggcttgcagagcaaatgcccaccggttatgccgaccgttctacgctgatccgtaacttaaaaagcagcgacggcaaaacaaatatcggtctcaccaacttcgcaataaacgctctggatgccggttccggctacatctatggcgcttacggccaagacgtaaccatggcatttcttaagcagcagcagtccagatttttcacggattccgatgcaaatctgaccaacagcgaggtcaatttcatctacgaaacctacggcggaaagcctgcttttgactgcatcgggctcataaaagcgtatgaatggattgatgaagacaccggcattatccgttaccaatccaatggttttcgcgatgtcggcgcagacggaatgttccgcagcgctgtcattttcggtgagatttcctctatccccgatacacccggtttggccgtttgtatgagcggacacatcggtatttatataggaaacggtgaggtaattgaggccaaaagcaaccacgacggcgtagtaaaaacgcagctcagtgagggcagttggacgtactggatgcagttgcctggcattacatatttgaccggcggaacacacccatacggcactaaaaaggtaacactggagaacggcagaattaaagaaatctccgccggaattgtagcgggaaagggtgaatttgagtggcctctccccgctccttacggtaaagattacattacttccggctccggttcccggtacaatccggtcaccggaatgtacgaaaattcgcacggtgcaatcgatattggttcaccggcaatgaccccgatttatgcagcggccgacggcacagttgtgatgagcacttggcatgattcctacggcaatttcgtaaaaatcgaccacggaaacgggtggtctaccctatatgctcaccaaacaaaacgtgttgcaaaagtcggcgagtctgtatctgccggtgatctcatcggctacgtcggaagtaccggggattcgaccggaaatcatctccatttcgaaatcagatacaacgataataggctcgatcctttgcaattctttgagtgatccacaattttgtgggtattctttccttactaataatcggcacgcgaagcgtgccgacggcgaaaatttttgaagaaaaagaggtcaaaaacaatgaaaaaactcaccataaagctcaatttagatgagcgaaaatacgatgcactgcacaccttttcaacacaaaaaggcatcgatattgacgcagaattcgtagcgtatttcgagaaaatgtacaagaaaatcgttccaaaagccgtgcgggaatacattgaaggcacaacactttcaaccgtttctgatccggtttccgaagaaaaggttatccacaatgacccacagcttcagccggaaccggagcccgaaaccaagtcaaatccgatctcaaaccccggtggtttctggtcgtaatatttttaaactgtttcgcatctcgaaaacgcaccaaaatctctcaaatcggtgtctttttagaatgcaggataaagcatcaccaccaaactggtggtgatgcacccacaaacccgcacagtgtgcgggtttttcgagaaaaagtttggtgacgaaaaattagtttagtgacgagtacgtcaccaaacattcaaaaagcatagatttcatgccatttttcccatcaccaaactcatcacagccgaaaggaacccaaatggaagaaaaatcaaatgtttcaagattcactgtttctctttcaaccgaggggaacaatgcactaaatgcaattatgaccttaacaaaccgcaatccaaatcgcgaaaaaagcaatgtaatcgatgaggctatccaattttacttctcatatctctctggtcagttcaacatggattatgtttgcggcatctacggcagacaagtcgaagcacttgtgcagcgggcaacagaccgcatatcttcgcagctctttaaacaagctgttgaaacaaacatgctaacacgtatcgtcgcattcgaatacgaactatcgaaagatgagtacgataaaatgcgcagcaaagctgttgcagccgtaaaacgttccaccggccgcatttctctgttcgatacaatgcaggacagtgaggaataaagccttgaaatgatttcacgaacactgtataatggaggtgaaaaattaaaacatggaaaaattgattcgagtgttggaaggtattacagccactttgtgggcaataaccattctatattctatctttttcttttcactgggaggttttcttttgaacgatatttttcaagagattctaattggcttaataactggtgctatttcttctcttgtttttacctcgatttcgtattttgcattcttacacaaaattcctgaaaaaacacatgaaaaaattgaaaagctcttaaatgatcgattaggctacgaaactacaaatcataacgctgtaatgggtgctcttaatccaaataacgaagttttgcttaatttagtttcaaaagaccatcgagaattaaaagtgcttacgggcgagaccttacagcatctacgtatggaaaaagccgctaaagaaaatcgcgagcatatattgaccaacgcagaaaaagaaatcgataaacatattgagagtttacgcgctttttccgacatcatggtaaagcaacaagaaagaattgtgcatttagagaaagaaaatatggaactcaaagagcaaattcaaaatttaaatgcacagctaaatcagcagcatgaacaaagccaatatcacaaacacgaaaataaacaagattttggaatgtatctataagcaacgctttaggaataaggaggtgtcgccatgcactacacattgatgcacaaagaaatacccgtagtcgatattgaactggacgatgcgtccggcgcgattactcgtgtggatgacgtgcataatgctgcgcacattccaatcggcattgcgtacaagaacgacattctcgaccgcaaggcactcaacaaatggtggtatgggcgttccattccggcaagccgtcaaggcatccaacaagcgctcgctattctgcgtatcggcagcacgcaagagcttatcgataaaagctacggacttagcctttcggatcagtattggatcaaggagaaaggttcctcgttggaatgggctgagatcaattttttcacaaatgatttttcccgtgacatcggtgacattctttttagcggtcacagctccagtgcgaaaatcgatttgatgtccccggacaacacctccgatggttggctacgcaaaaagtggacaatcatcgacggcaagcgctgcctcattaaaggcggcagtggcgtgacccaacaggagccatacaatgaagttattgcttctgagctgatggaaaagctcaacatccctcatgttccctatcggatcattatgcagggcgattatccttacagcgtttgcgaagactttatcgatgcggacacagaacttatctctgctgactacatcatgaagtctcaaaagaaagcaaatcacctcacgacatatcagcattaccttaactgctgtgccgcctttggcatctctaatgcacagcaagccgtagatcaaatgattgtcatcgattatttactcgccaatactgaccgtcactataataacttcggtgcgattagaaacgccaactccttagagtggatcggttctgcgccgatctacgactccggtacatctctttggtgtaatacaccgaccaaactcatccgtccgctggcctctgatttgccttcaaagccgttcaaagaaacgcatgaggaacaacttaaactcgtatcgtctttcgattgggttaactttgaagcgttacagcactttggaaaccgtgtgtgcgaaatcttcgcagagtccccctacctcgactccgaacgctgtgtttgtctttcgagcgcattagaccaacgtatcgaacgtcttgaaggtttggcgctaaccatgaaccatgaacagcaccacagtccaaaaattgaagaagaatttgaaatcaagctgtaaaaccggaagtacttccggtttttccttttctcattgaaatcaaattaaaaagctattataatattctatatgaggagtgaacgactatgaagaaaaagatcacagcaatattgatggcggcggcgcttatggtttcgcttgcggcgtgtgcgggcagcaataccgaaagcgtcgtaacggagagctccacatccagtgcggtaagcagcacggtatcggaaaagaacgatgcgagtagcaaaccgactgcaagctcaagcactgcaagtgcaaagcctacggcgacgccgggcgcaaaaacggaaagcagcaaaaccgagagctcgaagggaagcagctcgtctgcctcgtctaaaacggaaaacagcacaatgagtaagccgtcgtcttcaagttctaccggcagcacagtatcgaagccgagtgcaaccgcaaaaccgtcggcgacaacgaagcccagctctggcaacaatactgtgagcaaaccgtcttccggcagcagcgcgactgcgaagccttctgccacagcaaaaccaacaactgcgtcgacaactaaacccacggcggcaccgacagcaaagcctacctctaagccgactgcaacgactaaacctgccacgaaacccacaaccgctcccacagccaagcctacaccggctccaacaccaaagcctacacctgaaccgactccagtgccgacgccagagccgactcccgaagagccttacattgtgaccggaagtataattgatggattatttgacagcgtttctgatgccagagattatgctgaatctgtatggggagaaaagactctccctgatggtagctatgttaacggttatggatgggaagaagttgtttattctgatggaacagtgaaatatacgatttattggtactaaaaaaagcccacagattgacaaaatctgtgggctttcgtataataagccagtaaggcttactttaaacggtaggcggttgccctcgaaagtgcgcttcggcgtataaaaggagggtgaaatatttcttttgccctcaatcctatactggaaagggggcgatgcagatgtatttaacagtgaacgacttttgccagatttgtctggtaattatcggcgcttcgggactgatcgttgccttgattagtctgatacatgagctgaacaaaaagaaataagccgccccgtcctgagaaaacgagcggcttgtttctgctgttattctgagggctaaccgtcaccggtaagccttacacttatattatagcaggtttcacaacattgtcaacagagaccaactctacgcaaaaaatagaactggaattagagaattgattatatcaattctcttttttttttggtggaattcaggtcgcatacaaacgttatgctaccttttacataaatatttctaggaaaggatttgagagagaatgaaaagattgaggaagccgatcgcatggattctatcggtaatgatgatcctcacaactcttccgatcacagctcttgcagacgaagttacgctaagtgatagtagctcatctactctaacggtaacatctacaccagaactggaagtaacgccgactccggaaccggaggtaacgccgactccggaaccggaggtaacgccgactccggaaccggaagcaacgccgactccggaaccggaggtaacgccgactccggaaccggaagcaacgccgactccggaaccggaagcaacgccgactccggaaccggaagcaacaccgtctccgaagccggaacaagttcctggatatcaggtggcagaaaccgaccgaaacggtgattttctgtggccggtccccggatacggcacggtgtcgcaaggatatgacgcaacaaaacacaccggaatagacatcagtgcagaacaaggtgttgcagtaatcgcagctgcggatggcaccgtaagccacatacagacgtgggatggtagtacaaccacaggcgatcagtcctacgggaacatggtgcagattacccacgccgacgagagaacaactctatatgcgcatctctccaaggttcttgtatcttctggtgactccgttagtgccggggaaacaattggatatgtcggcaataccggtaacgcagacggcgcacacctgcactttgaagtgcggcagagcggacagacggttgatcctcgtccgttcataaccggagggaacccggaggatccgcagaaaaaattcgaggaactgcttgaaaagtatggtggctacatcgcagaagatgggcaactgcgtacgttagatggccgtgaagccattgacaaacctcttgcggaaattgaggcagaagccggaatgaatgttcccgtgttctatgcctcaaatgtcacagtatccgagtctcgctccacctacctgataaatatcgggtatacgacggatgttgagggaacaacaaacggatggggcggaaaaaggattaacgggaaagtcgcctactgtgtagagcatggcatcgccattggcctgggggacaacgatggatatacttctctgaacctaaccagagaacagatgaaccgactcacattaattgattattggggccggtacaaaaacattgccaatatcaaaggatgcagcgctgtaaactacaactgggataccatcgaagtgtccgctgaatacttggctgaattttactgccagctgctgatttgggagacaatcaacagcttcggaggcgactttgtgggtgcttcgagcgtgtcgttccagagcacgataggtggtatggagaacattgcttctcaatctacctacaatgccttcaaaaaggctgtccttgcgaaagtagaccagttctacacaacgccaagtatctcgggtcaaaccgtgactcttaaagtcggtgagtccaagactcttacagatactaccggtgctcttgcaaactataaagatgctccaattttaaatactacaggaatctctgttactaaaactggtaataaagttactttaacagcaaaaggtacaccaaacgcctctggtgtagtaagatttggctacaatattgatcgtgcctatgacgatcaaggccccggttattattaccagcatcctgtcagtcaagacgtcacaacctgcggtttcaatggtggtgacccagctattatgaccctgaatgtaaaagtcgagcttgacggctctatgaagatcgtcaagacctcagaagatggcaaggtttccggtgtacggttccgcgtgacgggtaacggcgtggacacaactgtgcagactggtacagacggcacaatcattgttccaaacctgaaggccggcagctacacggtgaccgagcttgatgtgcccgatcagtacgtgcagccaaagtctcagacggtcacggttaaagccaacgaaacagcaacggtaagcttcacgaacgtgctcaaaaagtggaaagcaaccatcacaaaggtggacgcggaaaccggagccgcacagggcgatgcctccattgccggtgcagtgtacggcgtgtatcacggcagcgatctcattgaccagtacaccacaaacgccagcggccagttcacgacgaaagagtacgtatgcggggataactggtatattcaggagatttcgccgtccagcggatacctcttggatactacgaaatacccggtcggcgctgaaccggacaagtatacgctggagcataaccagattccaatcggcgttaaagagcaagtcatcaaaggcaaaatccagatacacaagcagtacgaaaccctagagggtacgccgaaagatgaggctgccgcagaatttcaggtctacttgaaatccgcaggcagctatgacaaggctaaagcttctgaacgcgatacgatcataacatcggccagcggctatgccgtaacaaaaaacatgccgtatggcacgtacatcgtccaccagaccaagggtggtgctggccgcgaatttgtcgatgattttgaggtcgtgatttcagcaaacaaccagacttacagttacgagcttctaaatgaactcaagaacggccagctgaagatcatcaagatttccgacgatggtaaggttgagggcattcagttccgcgtaacgcgccttgcagacaactacagcaaggtatatacgacggatgccagcggcctgattctgaccgaaaccctcccgatcttcgaagataacgaaggcaaaaccaagtatcagtaccgcgtggaagaactcgatacaaaggaaacctttggctatgctctccccgatccgcagatcgtcacactggaagaaggcgacattgccgaagtcaacttccacaacgtcccgctggagatcggcacgatggcaaagtttgaggatggcacgaaagatacgcagagtgcgcaggacattgtgctggtggataccgtgcgctataccggcctgcaggtcggcaaggaatacaagctatccggcgttctcatgaataaggcaactgccaagccgttccttgattttgatgggaatgaagtgaccgccgaagcgaccttcacaccgacggatgcagacggcacagtagatgtgacgtttatgttcagcagcttgcacctcaagcaagacacagaggtagtcgttttcgaaacgctctatcgtgaagacatcgagctggcaactcatgcacagattgatgacgaaggacagaccgttaaaatccgcgtgccggagattggaacgacagcgacctctgaggatggccaccgcgtcgatccgctcggtgaggtaacgatttttgatgaagtatcgtataccaatctcaagcctgaaaaggaatacaccgtatccggtgtactcatggacaaggcgaccggcaaagcgtttctggatgccgatggcaaagagatcaaggccgaaaccacctttacgccgacgcagccgaccggcacagtgacggttgagtttgtattcaacgcaaccggcttgcatggcaaggaagtcgtggcctttgagactctttactatgagggtatcgaactggcaactcatgcggagatcaacgatgaagggcagacggtcgagctgaagaatcctgaaatcggaacaaaggcaacagcagacggcaaaaaggaaattacagcggataagatcacgattaccgatgttgtgagctataaggatttgacccccggtaaagaatataagcttaccggtgtgctgatgaacaaagccacgaacgataagctgcttatcgatggtaaagaaatcacggcagaagctacctttacgccaaaagctcctaccggcgaagttgagatgacgtttactttcgacgcgcgtgagctgacagccgaaactgaggtcgtagtttttgaaacgctttatcgcgacggtattgaaattgcagtacatgcagacatcgaagatgagggtcagacggtgaagattctgccgctgcatggctccattatgaccaccaaggtaaacgcagacgacccgacagataaaatctccggtgcgacgttcggcgtttactccgatgcagacggtgacggcatcttcaacgctaagaccgataagctcgttggcacgcttcaggaaggcgacaccggcgtttatacgctggattccctcccttacggaaaattcttcctacacgaggacaaggctcctgagggcttcgtacaggacaacatctactatccgtttgagattaaagaagacgggcaaatcgtaaactttgagactgttcccggcaaagatttcccgaacaagccgatcaaaggcactgtcaccaccacaaaggtggatgctaccaacccgcagcacaagctttccggtgcagtgtttgaaatctaccgcgatgcagacggtgatggccgctacacagagggtgtagatacgctcatcggccgtatggatgaaatagaaaccggcttctattccctctccgaccttgtttacggaaaatacctgatttacgaagcacaggctccggcaaacttcgtgcgcgatacgatctactatccgttctctatcacagaagacggccagaccgtgacgtttgaaacgatcccgggcaaggacttccccaatagccctgttcctaaccgcccgaagaccggcagcagccgcagtgttcttccctacattgcttttgccggttctgctttaggtttgactaccgtacttctggttcgccgcaaaaagagcaaataaattttgaatagcattgcaaaaagcaagagcgcccggattatcccgagcgctctatgtgcaatgcaaatctagtatttacttttttgtattttctttattttgctgttcctttttattcgcaattcttatcagaaaggaactctattatgcacaaactatttatatacgcaaagctgttccatattggcctatttattataaatctatcttgcctcatattcaacatctataaaatcttcactcacacttcaaccagcaacagtattttcatctacttattaggagctataatctgcgcgctcggaacactcataactttcattttaatgattcgggaattactaaaataaattcaaacaacgatgcacatagaatacacaatcaccccaagtgccctataccagatttaatttgtcttcaattcaattttacccatgcagagcgaaaaaacctactatctcacttcagtctcccggatagcaggtttttttaatgcaggaagaccggtcgcaaccccggcggggcctgctaatttagttttaaaggaagaaaccccatggtatcaaaagagttttttgaatttatatcgtcacactgcgggaacgtagttgcatggctactggttttactgccattttttcatctgacttttataattggtcgatttatttgctatttatttcgagagtataaaattgtatcacaggtgatagggcatgatagcgatacacctctttggatggtagcttttgagctatcctgtatggatatttacccaagcattatgctatatgctctgctttctatgttttactttgatgttaaactcggtgcaatactgacaatggtttcggtaattgtatttttaattttcctacttgataaagccgtaacagcgaaaaaggatgtcgggttttatgtgagtttccttataataggaatggtagtcgcgacgggaattctttatcacttttttggttcataattttcatcaatgcgattgagtatatccgcaacaggtatagtagctctaaacgaacaatgagggcaagtaaattccatgccaaagtttttgccgtctttgatttttagtggagttcgaaaagttgttttgcaatgtgggcatggtaatgcctttattttataggatttttttcgatctctactgtaaatacatgcacctagatgccgtgctttatgtaacgtaattacgttccgaaaagctgaaaaacttacagctccaaaacaaattatagctatcagttctgcgattaagaagtagtagggagctgtattgtgctcaataaaagcctcatatagtatttccccaagttttaaaactgcgttttcacctaatcggttaaaaagaaaatccacaatagtgacaccagaagctactgctcccaaaacagcaaaaatttcctcacgtttcataaagttagtagacttccctttttcaattacatcgcttgcgcgatattgtcgagaaccattgtcatttgaaatagcggtatttataacgatttgtcctgaatttttaatgttgtttaagtcgtttttaatttgatttttcatgttttacctcgacccctacaatcatagtattttgaagaattatcatagatattgtagcgcactcgagtttataaatcaatatatatttaagaagcccatgcagagcgaaaaagcctactatctcacttcaatctcccagatagcagttttttttaatgcaggaagaccggtcgcaaccccggcgaggcctgctaatttagttttaaaggaaggaatcccatggtatcaaaggaatttttcgagtttatatcggcacactgcggaaacgtggttgcatggctactgattttgtggccatttgttcacttagcgctcttaatacaaactttttctcgtacagtctttaatgaagttttatggctaatagacatgggattaggaggaaaaggtcaatggatcacagcgataaaaattacttgcataaaactatacctacatctactaatattctcaaacctctcaataatttacttcggcataccaattggaaccatactatttgttcttgttgtcgctaccttcataattcatattatcgatattagcatagaagataaaacgctttccgaagatctccccgggattatccgtatggtgatctattttgtcctttttgtagctattatgtattttctttttcttcttctttaattttacgtttctgttcctttacaaatctccagaaagaatttggcgatttgtttttccaaaagcgccaaatttctattacaagtcctacaagtgctgcacttcctatcaacgatccaataccaattaaccaagacgttcctaatgataccacgaaacagatcaatatttcgaaaagtacaaataaaactgctaccataagatgtacgaacaatttaaatggcccctcagaaccatatcttagtacatgaaaggaatatagcgtatctcgtggatagcccaatgctttgcgcaatctattatcttcattagaaacatatgcacacaagatttcataatctttgcgtaagcgcttcattattttcttttctctacgacaagccaatttgtccttttcatcaattctatttagtattttcttataagtttcaatctcggaaatcatacgcaaaatttccggatgcaaaagcttttggctatcgtttctctcctttaccattttcgtaattttatctgtaacttctttattataactttcattacggctcacaagatcaaaaagttcacagcataaaccaaatgacttttcgttcacctcgtcgtttctcttactggtaaaacctttcttaacttgccaaaccgcaagtactgctgctaaaggaatccccacaatatttccaatttgcgaaataagcgcattgattaattcagaattcatgttttcacccgttcttaaaagtctgttattcttaaataaagtatataccagatttaatttgtcttcaattcaattttgcccatgcagagcgaaaaagcctactatctcacttcaatctcccggatagcaggtttttttaatgcaggaagaccggtcgcaaccccggcggggcaacctgtaaattcaaaagaaaggatgagcaaatgcaaaaaagaaaaaaactcgccgtgatcggcacactgcttatcgtgttggtcgccggtggtattgtatggcaggtcgtcgatgtcaatcgcaccgggcgttcgccggtatcagctctatttaaaaatgaaggacaagaagcttcttccaatgaaccgtcagctgatcccgttacaatcgtcttgcgtgaggaagtgccgacgccaacaccatctcctaccccatcgccaacacctacttcggctccaacaccgacgtcgacacctacttctgcaccggcagaatcgtcaaaaaccggaagtacttccggtttttcgactgaaagtcggccatcgggttcgcaagcaggcaatcaaaacactgttgaagaacccaaaacaacgccaaaggtcacgcctacgcctcggccgcaggtcattgaggcaacgccggaacccactcccgtcccggaggtgcaaaacatctcgcttgatacatacagcatcgatattttgcccggagacagctggcgcatcaacattgccgcagcacctagtgatttttacagcatgggcgcgcagtgggtgtgcagcaactccgctgttgtctctctctcaggttccgatacttccggcgtcaccatcacggccgtaagcacaggctcggccaccgtcaccgtgtatagccgcagcaccggtcaatccgcaagctgcaccgtcaacgtaaattaagaaaagaggtaactttatgaacatcttaaatcagctctattttctcgctatttcacatttaccggcatccaccgtcgccacgatctccggtgcactcgaaagtgcttttaacaacaatgttaagccggaaatgaaagctattggaaatattatcatgtatattatctccggcgtgctcatcatcgcgttcgtcgtgaaaggcgttttcgtgtggagagactatcgtcataacggcggagaaattcaatggaacgtactgctcgttctgtttatttgccttgtggttgttgtttccgcgccctcgtggatgtggagcgtcattgggtggtgatgacctatgtttgcaagttcatcgctcgaggaagtttatcactatgtgtactatcagctcacctctgttgccctcactatgctcgatgatgtaaacggactatccatcaacttcttcagcaacgaattcatacaagctattgtgaatttctttaccctgtttgcttgggggctgggattgaccggcgcagccattgctataatggactttgccgtttcctatcagaccggtggaggcggcagctttaccggaaccggcatgaacatgctgcgacttttagtcgccctgctcaccttttcgagtattcctatattgctgtttcaaacaagcatggatatttacggcacggtgcgcagcgtggtcgtcggatcaatggacggcgcaaccgtcagcataaccgatttggtcaaaggcgctgtgcaaagtatgtttaaatctgtttatggcacactgccaccggttaaaatcgcaaacggaatttgggaattcctcaaaaagcttacagacggcttccaagccaccgatcccgccgatgccgcactttcctcaaatgccgactggtgggcgcttattcagcttatcattctggtgtgggcaatcttcaagattttcttttccaacctcaaacgcggcggtatccttctcgtgcaaatttgtgtaggatcaatgcacatgcttgcgcttgcacgcggatataccgacggcttcggaagttggtgcaaacaggttgcagctttgtgctttactgcttttgtgcaaaacctgctctatctgctcgccattatcatgatgcaggatgcagcctcctcaagcctgtatttttcgctcggcctgctgcttgttgctgccgaagtaccgcgcattgcgcaaatgttcggtctcgatacttccgcaagggtctcactcggcaacgctgcacacaacgtctcctccgtggtgtcgttggtcaagcaattcgcataaggagaaaacatatgaacgacgatcaaaactattttttctacccggaaaatctcagtgaaaaggcattgtttttcggttggacgggtataaaccttgttatcatcgcagtggggcttgtgctctctacccttatctttttcttctcttttgtctgggttccgctgttgataaccctgctgtatatggtgttgacttttacaaccgacaatcaatcactgcttaaagtcatacagagatatatcaactatctgtttttagaccagctcgagtacttctggggcgagcctaaatattaaattggagcaaaaaatgaaatcaaacaagaaaaacgacaaaaaggaatcggcaacgcaacaactgctgaatctgaaacaatttgtacccctccaaatcggagataacggtgcggtagccattgaaggtgaagacggtatgctgtacacctacatcatgctgcggccggacaacatctctgttcttggtcgcagtgaggtacttgcaaaaatccgcaaccttcaaaatattctttcagatgttggcgagctgcaaatgctgtgcatgtcctcggcgcaaaattacgaggataacaagcgttactaccgacatctcgcagaaaccaccgaatcccccatggtaaagcagctctgcttgcaagaaatcgcttatctggatgaaatcaacatcgcgatgagcacaagccgcgagtttgcaatgatcctgcgtcaccgtgcagatcgtctggatgacgctcggcgcagcattatgcaaacccttaatctcatccgcgaacaccagtttcacgctcgcatcgcaacaaaagacagcttcaagcgtctgcttgctatttactacgttggagacatttacacagagcatgttcccgattttgacggaatgcaatatatggaggtcaacaatgccactgtttaagaaaaaggctgaaatgcctacaccggaggaaattgaagcaggcaaagtcaaatcctacaaagatttaatcgcgccctctgtagtctccttcagacgttcgccggggtattacattctcggcaatacgtatcgctgcgtttgggcgatccgttcatacgcagaaaccgttgaaaaagattcaccggaaattgctttgctgcgcgagctcggtgaatctgacggtataacgctgcatatctacacacgtcatatgccgaccgtagagcgcgatgagatctttcaccgtgcccaaaaccgcacaaatatgcaaaaacgctcatcctacaagctgcatgaacagattgaagccgatgagcagcttactacgctttcccgcatgatccgcgaaacacagcgcacgaaagaaacttttgtgtactgcgccgttttcattgaactgattgcagacagcctcgagcgtttacaatcgaagcagatcgaaacgcaaagcatcctaacgcaccataagattttagtggataagctatacctacggcagcttcaaggctttgaaagcgttaagcccaacggcaaaaacgctttcggcacagaatttgagcgtgttttcccagcaagcagcgttgcaaacctgtttcctttctcctactccggcaagaatgacaaaaacggattttacatcggccgtgaccagaacggcagcaacatcattgtagattttgaccggcgcgccgaagacaaaaccaacggacatatcctaatcctcggcaactccggcgagggcaaatcttacttgatgaagctcatcatcacaaacgtcatcatggcgggcaaaaaagtatatatcctcgacccggacaacgaatatggagagttggttaaaaacctcggcggtacgtatctggatatgatggacagcaaatactacatcaacgtgctcgagccgaaaacatggattgacccgacgcaggaaatcaatgaatttgatgactctccggaagcctttaaaaagcaaaatcgcctttcacagcacatcgcctatctgcgggacttcttttccgtttatcaggacttttccagtgcgcagctcgacatcatcgagatcatgttagaggaaacctataaacgtcgcggcatcacaccccgcacggacttcacaaagctgacctctgaggattacccgattttgagcgacctctaccgcgtcatcgaagaaaagctcgaaagctatgatgaagaagccgcacttgccgctaaagccggtcatcccgttatgtacagcctcgaaatgctcaaatccgtcggtctcggcctgcgcggtatttgcatcggcgctatgtctcgatactttaacgggcacaccaacataccgaattcaaactttatcgatttctgcgtcaaagatgcactcaccacaaacgacaatctgaagaacgctatgttcctgaatatcttctcctatatgagccacaaattcctgaccgaaggcagctgcgacctctttgttgatgagcttcacgagttcgtgaaaaaccgtctggcaatcacctacatcaacagcttcatgaagcgtggcagaaagaaggaatccggcgtttgcatcggttcgcaaaacgtggaagatcttctgaacccgagcgttatcacatacacaaaaccgctcatgtctattccgacccacagctttctgtttcaccccggtgcaaactgcgatatttcggagtttcagcgcacaataaacgtacagccgtgggaatatgagatcatccagacaccgaaccgaggacattgcctctataaatgcggtgcggagcgctatcatctctccgtccgcgccccggagcacaaatctgcactgttcggtaacgccggtggacgctaaaaagcggaagtacttccgctttttatattgaaatctcggtaaaatcgagcagtcatctgactgctctttttatttctatacaaggagatgaatgcctatggacggagcacgtcttattctaaacgcaagatactttcatatcgcccagaccggtgaaaaagccacaaagtacgcctttgtcgccgaagccgcagccggactggtgaactacattgcgacgcgtgaatccgtcatttataactacgatgagcattataaggaagtgagtgccacagaagcacagcgcgaagctataaatcaatttcttgaggtatcccctgaccttgagctttcgcgcgaattcaaagcctacgacgaagaccgcagcgccgcaaacgccagcgctctgatctcacgtgccgcacaatatgtctacggcatgacagcagaaggtgacgttaagccctcggccccggccacacgtgctcagcgagaacgcatacaggagtttgtaaacaaagtaccggccatccgtcaaacaccggaatacagcgactacaaggcttcccctacgcgtgaaaacgcaagcgaagtactctctcatgcactcgaagtcggtctcgctaatgctgccgaccccgaaacgcttgaaatcatgctcaactacattgcagagcgtccgggcgtcgtccataacgaaggcaaagtgcacggactctttaccgtaaacggtgcagctgacctcgctgccgaaaaggaggctattgccgcacataccggcaatatttacagcatggtcttctctttacggcgcgaagatgcagaccgcctcgggtatgaccgacaggatgcctggtctcagttgttcgccattaaggcggacaaaatcgcccaagcgctgcgtgtgccgacctctaagctgcactgggttgctgccgtgcacaacacaaagcatcacccgcacgcacactttattgcgtacagcactgaacaaaaatcccgcatatacctttccgaagatgccatcgagcagctgaaatctgaattcgtttcggagattttcgctgaagaacgccatcagatttttgccccacgtgaagaagcacgtcaacagcttgaagaccgattggagaccttgttcacacagctcgagcataacagcaatgctgccgttaccgatctactcttgccggaaaagcttgcagcgttacgcaagtccattgaaagtgcatccggtcggcatgtgtataaatatctgccaaaagacactaaagctatggtagataaactgctcgatgagatcagtgaagttccggaaattaaagagctgcttacagagtacaacaagtatcaacagcagctcgaagcttattataagacgccggacgagcctaagcccttatctgccgcgaccacgcgcagcaacttgtatcctttgaaaaatctcgtcgtacagtatgccttgcagttcgagccttcacccccattgactcccaaaactgaaaattcatctgcaaaaaccggaagtacttccggtttttcttattctgatgcgttggatgagcctgaaaatgcacaaatgaatgaaccgttcaaagcgacatggaaaaccaatgacatacgcagttggagggataacatgaaagttcaaagttcttcgccgccgtatgacggaacagccgaagaaaaataccggtatgcccagtacctgcgttacgatgaaaaatgtccgcaagacgctatcctgtggtacaaccttgcggagcagctcggtcacaccgaagccgcctatcagttagcgcagtattatttgaaaaagggcgaagatcaagacgttgaactcggtaactattatttgctaaaagccaaactcgggtttgaagataccctgttagatagcgtcaacgccatgcagcttcaagcaatctcggctggcaacacctatgcagatgccattgccgattttgggccactggaagctgaagaaaagaagcagcagcgcgccattagcagagccgcttatttcctcggccgtatttacacaaccggcattgaaatcgcaaacatagacggcatagagtcggaagatcttcctgcactgcaagtcgcgactgatccgcataaagcagcagcttattttgagtttgcttatagaagtgggtataagcacgccgcctattatctcggcaatttgtatttctacggtaagctctcccctgccgacaaaccggattatgaacgtgccgccggttggtatatggccaatactgaaaacccctattgccaatttgcactcgcaaaaatgattgaacacgggcaaggctttacgccgaatgtcgaaaccgccgaaacactttaccgtaagtgcttaaacgcaaatgattatttaactgccgaatcctcttacgccatagcgcagatgcagaataacgagcagctgcctttaaccgatatgcaaaagctctacaaaactgccgctgaaatctggctaaaagacgatcatcccgaaaaccatattcacttgcgccttgcacgcatgtatgaatacggtcttggcgtgcccgaaaatctttcacttgcaatagaccactacaaggccgcactgaaaacaccggaaaccgaatacaagctcggtcaactcatgcagcgtatcgacggagatgcaacggagatttacgcacactatgcggcagcacgcgtcggtatgctatatgctgaagaacatcgtcctacatcggcaacagcacaacaagccgtgcgcctcgcaactatgtatcgctacggactcggatgcgatgcagaccatgaaaccgccgtgcactggtatacggtcgcggctgaacgcggcagcatctatgcgcagcaacgcttagaagtcatggagatgcagcgtatccgtcaagaacagcgtgcagcagaatacgccgaaaagcaacagcagcaacagaacctcagctttgctgctcgcctactcaatacgataggcaacgctttgtgccgccaaacgctgcgagatcaacagtctgccactgccactaccgaccgaaagcagagacgtatgcagcgtaggcttaaacgagcgctcggtcaaaaagaagactacgaacaaattttccagtaatatctttaagggatccctatgaagaaaaaaagcaacaaaatcaactttaaatctaatagttcacgagctatatacaattatgttctcgaaaacaattacaaaatcactgtcaaacaagcttgtgacgagcttgccgtaacaccgagtcaggtttatagcttaatcggcctactgcgaaaaaaaggcatgaatgtccgtgtcatccgaaaatcggtcgagaggcagatttaccgagaagcacgacagtacatagaagaacataactgtgaaatttctatcgcaaaggcttgtcgggatcttaatgtatccagagaacagctcaacaatatgattcataaattctgtaaaaacggtatgcagatttccattatccaagcgagcgacatcataaaattgccgctgaacaaaaatactgaagaagccgtatatcagtatattgtcgaccataactactctatttcatccagacaaatgcgcacagatttatctttgacaaaacagcaaacaaagtcctttctccaaaaattccgtcgtaagggcatagaaattaccgtcgtagaaagtaaaaagaggaattcagatgcgcagccacagtgaatatattcctctgacacaagatcagatcgcgcttgcacagcacacagacattgtagaatatctgcgcgaacgcggtgaaaaggtgcaaaaagaaggaaatcattacatctgggaaaagcacgatagctgcgtgatccacggctataaatggtatcaaaacagcaccggcaagcacggcgctgccgtagcttttgtgcaaaacttctttcacaaaagcttcccgcacgctgtgcttgagctcatcggcaaccgacagatcacttttgatctcgctgcccctcctcccaccaaacgagaatcaaaacccacagacatgatccccgttgctttctgcctgccgccagctgcaccggataaccgtcgtctgtatgcgtatctcacgcatacacgcagcatcgcacacgagattgtcaatactttcattgatgagcatttaatttatcaagataaacaaggcaacatcgtatttgtatgctatgactgcttcggccgcgtaaaatcagctcataagcgcggcacgaattccgcgcagcgttaccgtagctttgtgaccggcggcgaattcaactgcggcttttcatacgccaatgataacgccacggtgctgtatgtatttgaagcacctatcgacttgatgagctttctaacactgcatcggcataaaccatggcacagagcaagctacttatcgcttggcgggctttcagaagatcctttacgccgatttctcaaggagcacaaatctattcaacgtatcgctttctgctttgataacgatataaataagcccgaaaatcgagggcaagaagccgccaaacgcttcatgcggcagttttccggcaaatacataacctctattctgtgcccgtgcaagaaggactggaacgacgtcttgagagacaaaattcagaaaggagagtttctatgaccccacagcaaattatatttttatccatcgtcggtattgctttggtcgctttgatctttttatccgagtcacaaaagcgctacaatttggactctattaagcgtaaaaccgtcggcgacggccagtatggcactgcccgttgggcaacacaagaggagatacagagttcgactatccaagttccttacgagccggaagcgtggagatacaacaaagaaagccgcccgactaccgcaggcatcgtcgttaatttgaaacagaacaaaaaacaaattctcgcaaccatcgatccttcagacagccacactctcatggttgccggaaccggcggcggtaaaaccaccacctttatgattccgaatatcgaatacgcgctcgcttgcggtacttcctttatctcaacggatagcaaaggtgacctgctccgtttatacggtaagctctgcgaacaatacggctatacctgtttgaatatcaacttccgcacaccgatgaaaagcgacagctacaattacatgcagctcatcaatctctacatagatatgtggcgcgatgaccctaaacgtgtagactaccacagccgcgccgagcgctacgcaaaagctcttgcaaactctattgtccacacaaagggctttgacggcggcggtcagaactcgtatttctacgattcctctgaaggcttgatcacctccataatcctgcttgttgcgcaatactgcaagccggaagaacgtcatatcgtttccgtatttaaaattcttctcgaattcgtccaaaccgttaaatccgcaaatgatgagaccgatagccaaaggaaagtcaagcaaacaaagctgaatgaaattctcagtcttctacctgaagatgataaaatccgttggtttgcaggctccgtaccgggcagcgagggtatgcagtatttatctgttatcacaacctccatgtcccgcctgcttgccttcatcgactcagagtcagaaaacattctctgcaagaattccaaaatcacagtcgcagacatctaccagaaaaaagttgccgtattcatcacattcccggaagaagacgccacaaaacacgtattggtctccctttttcttagccagatcataaatgaagccatcgtctatgcagatgaatgcacaaaagaaaacaagcttacacgccgcctttatatcttcgccgatgaattcggcatttttccttatatgggcaacattctcggcatgtttggcgcttcgcgatcccgtaacattattatcgtgccctgcatccagtcaccggcacagctcagacagacctacggtgcagacggcgagactattattcgagactgctgccagaccgttattttcggtggcttttcccccatgtccgataccgccgttaccttcagcaagctgcttggaaaccagacggtcgctgccggttccgtttcaaccaacaaccgggaaggccgcggcctttttggtagtggatcaaacagcagccgcagcgtcaacatgattgcacggccattgatgacaccagacgaattgcagcttctgccctttggcaaatgggtcatcaaccggcgaggcagtcacccgtttatcgccaatatgccgcgctacgataaatggggcattcgcctagaagctccttatatctcagaaacacgagagtatgttcccaccgcctacgccaagttggatgatgttatacgaactataaaagaagaaaaatggcgacagaccgtacaggaaaagcgagagtctgctaattcgtcagagtccgtgggcagcaccgcagattattaaaaaccggaagtacttccggtttttaaatcttttttcaaaaaagttgaaatatactgatattcatgtaataatggagtggtacaaatgtttgagataattattcaattcttaattggagttctgacacctataattttgatcggagggataatagctgtgcttaacgaattgattcaatcttttgaaaaaaaagaagaatacaatcggaaattagaggaactcgaagaagaaatcaaagagttctcttctcaaaaccaaacgcttgtagaagattgtaaaagtacaattcgcgaaattgaacttgaacatcaaaaaactatacagtccttgtccagatgttcacaatcactatacaatgaggcaaacgctgttcttaaaaacacacatgacctaatgattatcaacggtttattgtccgagcgaattcagactttattaaaatatgctactacttcattagaaccagaacaagaatccaaactgatagaagaaattacatcagccattaatcacattaaaatggaaaatgaacaaatcgctcatcatcggcaagagctcgaaaaggctatgagagatatagagcaacatgatttagaagtggctcaaaaacaagaactcaaagaaatacaaggacatcattttggaggattaagcatataatatgacaaaaaaagaaaaatctcaacaaagcaaagagcctcccaagtatatccgtgtattgaaaatactatcgattttttctttgtgccttactatgctgttattaggtgtggtaaatggagctacttatgttgtgaaaaccgatattggacaggacatattaaaaaaagtaagcattgctcttcggccacacactcctactattatgtggctttgcttcgccttattgactatctatatttttgcaagattgataattaaaaaatggaacgctaatgataaaataagcgacatagacagaattactaaccgtgtaaaaaacgaacgcgataaagcttccaaagccaaagaaggaatttttaatttacgaaacagcattcttcttgaagacattcaaacatcaggtaaagtaaaagatgagctttataattatagcaaagagataagtcatacacggattgaacaagagcttgagtgtcgaaatgcgaaaaggaattacaataaaatacttaaagaactctatcttctgacactcaaaacgtacaaaaatccctctgaacaaataaaacaactgcacgatgagttgaataagctatagcaatgctgaaaaaccggaagtacttccggttttttatctttaaatatatcatttgccctataaagcttgctttttcctcaaatagaataatataatactttaataaggagtgtgatttaaatggcaaacacctctgcactttatgttcgtatcgatactgaagtgaaagaaaaagccgaaagcattctcacacagctcggcatttctccaacaagcgccattcggatgttttacagccagattgttcgtgaaaacggtcttcctctaagcttgcagctatcttcggcaagtcccacagtcacagatgatacaagtccagaagaaattgacgctgaaccaacgaaagaaagtacttaaaacaaaagccctacgcatcggatgaggcaagctttcctcgtaagccttaatttgccgcagatttagctcaaaaaccggaagtacttccggtttttcttttattaaaatcaaaactcagaaaggagacgccagtatggcaaagcaaaagaaaaccggcttcggcacgtacattacgacacttgtcgtcgattctgacctcacggccaccgaagcccgcctgtttgcattcatgcagcttcatgtcgattaccgtaccggtgttttcgatttgaagcgcaaaacgacctgcgcaaagcttgacatcaacctcaccacatatacccgcgctctgcgcacccttatcgaaaaagagctcgtttctgtcaagcaccgtactcgcggcgggcagcagattacctctcatattcagccgcgcatggagggattcaagctgcgcttcccgcgttatttgatttccgagctccgtgataccgcctttttggtctacgtcgagctcttaaaccgctgcggtaaggagtcctggtctctgagccgtcgtgtgctcgccaagaaattccactgctcggccctcacaatcagccgcgcaatccggcagctcaaggaacgcgacttgattgatgctgtaccggactatgaccgtcagggcatcaatcgtttccgtgccctctccctgcatgagcgcgtagcacgcttaaagcgccagcatagccgcaccatgctctttttctatcagatgcacaaactcgtgctcgaacgcaagagacagcgtacagctgccctgaagcgtcgttatgcgtattccctttttgcagcacccttatcatctatgcacctgctctttcctacaccccgttgttttattagtaaggaaagaaaaaataaaagtttaccattagctaagagtaattctctaatgggacttttgcgccgaaaagcaatggatcgtgcacgaagtcccatggtggagttttccggatagaaaaaaagaaaatgagctgtgaccgggtgaaggaatcagctcattttctcaggcaaggtaacactataagtgccccttttctgcttccagtataggttttttctctccgtttgtcaagcaaaaagcggaagtacttccgcttttttgatttttattttcttttatagcttctacatttatcttctagcaacgcaaaatcattacatctccgagctaacgaggttgaatcaccattgatctgcttgtgtttatataacgcagcagcattcttctgaatctttttctgcacggactttatgtagcgatattcagcaagaagtaatgatttgtaattgggatctttgatcgtttcaaaattcacatatacacgttcactgtacggtacagggaacatgttattcaaatttatcactgcatatctgagaattttgataaaatccaatccctctttcattttctcgtgttttggtttaaaagaagacaaaggtgcaaaatactccatgtcgtttatctgaaaaacgattccgatatactttctctgattggcttgtccctttttactattatgaaataaatgcggtgcatacggagcaagatagtcaacatattttgcattgatttcgtaaaatctgatattatccatttcccctccaagataaagaaatagggcggacacaaagcccgccctgctaggttacgttcgcattccgagtagcgaaacactcacttgtaaatgtcttgatatagagccaagagaagctcacgtattaaatgtctcacttatgggctgagatacaccctctaagcggagatgcaatatctccactattattatatgcaaaacaactttctttgtcaacagatttgctgttaaaaaaccggaagtacttccggtttttttgcttttcatcttcgcctttgttagaattcaagcaccctatgtggggaattttaataaaggaagtagcaacatgtacgaaacaaacaaaagggattacacactcggcgaatggcttgatatttggctcgaagaaatcgcgcccacaaagcgaaagcccaacactataagcatttaccgggacgccagacggcggctgctgacccatcacccggaggccgtcggtattcttctcgttgagctcaatgctttacaggttgaaggctggctggactccatgcggcagaagtatgcaaagtcaacgctgcgccatatccgcgttatgctgaatcaagcatacaaatccgcaataaagggacataactgtgacgataatcccgttaaagacgcagcacttcccgccgcgcgagaaaaagaagttaaagcgcttacacaacgagaacaggccgcatttgaaggatgttttcacatactgaaaaaaccgatagatgaatacattctgcgcatgtatttattgaccggtctgcgccgggatgagctacgcctgatgcaatggcggcaatacgatccgcaaaaccgcacgctcaaaattcctgaaagcaaaaccgaggccggtgtccgtcttctccctgttttgccagaggccgccgccatactctacatgatccggtgcagcaccgagtataacaagccgcatgactatatattcagcgtggctgataacgggaataaaccgttcagcacctatcatttgcgctatatctgtacacgcgtttcaaaggccgccggtatttgccatgtgaaccctcacatgctgcggcacacctttgctacacggctgatagaaaaaggcgccgacccgaaaagcgtctctatgcttctggggcacaaaaacgttgttttcacgctgcaaaaatacgtttcgccggatatggagcaccttgaaacagaaattatgcgtctttctcaaatcaaaaaatcctgaaaaataaaaaaattcgagaaatttttcccgaattttaaaaaaagacttgaaatttacggcttatagtagtaaaatatatattgcaaaatgaataaagccccactaaatcaaaaaattattagacaattttttgatttattccgttcagatgcgacaacatctaaaggaactcgtgaagcttatactcatattgtgtttaatacgtatgtattataacacattataagtctgtgttcaagagccttttgctgttacatctgcggaaggctctcttttattttgcccgtaccttgacaatcgaatgaacccacagacgagaatacccggcgcaaatcagtgtgcatgtgcacgcctctacaatgggaatcacgcggataagcgcgaccggacaaacctgatcgtgccgcacgtacaggaacggcgtctgaggatgggtcaataaaccaaatcagaaaattttctactaatagatgtgctcagttcgttttcggattgagcacatacattaggagaaaatctccttgttttggaaatgacacaaggtcatcaaaccaagtaaacaattttctgctaatcgatgagctcagtccgaatgaactgatctcatacattaggagaaaatctccttactctggaggtgacacccggatttgaaccggggaatcagggttttgcagacccttgccttaccacttggctatgtcaccattttgaaaaagacgccttaacttcagcgtctttttcttttggagcggacgacgaggctcgaactcgctacctccaccttggcaaggtggcgctctaccagatgagctacgtccgcatatggtgcctccgatcggaatcgaaccaatgacacggggattttcagtcccctgctctaccaactgagctacagaggcaaatgtggcgacccggaacgggctcgaaccgtcgacctctagcgtgacaggctagcgttctaaccagctgaactaccgggccacatttggtggggacaataggactcgaacctatgaccccctgcttgtaaggcaggtgctctaaccagctgagctatacccccaaacagcatcgcttttcagaaatctttcaacagaacttgcggctcttttgaagtcttatgccttccagcgacgttgtatatattaccacatgcttattaaaaagtcaataccttttccaaaactttttcaaaaaagttattttgaggcatttttacgcttttcgcgcacgctttcggcaagctcgtgcagctcctcttttgtgaagtaatacttgcggcagcagtacggacacaccgcttccaccttgccgtccacagccggcagcgtatcgatttcatccggctccaaggtcgcaagggcattataatacttctcacggctgcatgtgcaggcgtagtgcacggggatttcctccagcttttcgacttcaaagcccgtgagcgccgtgtcgaccatctgctccacggtcatgccctttgcaagcatggtggtgacaggctccagcgttgcgatattcgcttccagcttttcaatgtcctgcggcagcgcgccgggcagcacttgaatgagcagaccgcctgcaagcagcacgccgttcgtgttcgggtctacaagcacgccgagtgcgcacaccgtggggatctgctcgctcacggcgtaataattcgtgatgtcctcggcgatctcgccgctgacgagctccacttggcccatatacggctctcccgtaccgtagctgcggatgacaccaaggcggccgtctgtaccgactgcggcgctgacgtccagcttgccgttcggcttcaggggcacgtctacgttcggattgtccacacagccgcgcacattgccgtggctgtcggagattgccgtgacggtgccgatgggaccgccgccgtttatgcgcaacgtgagcgtagcatgctcttgcttttgcatagcgcccatgatggacgccgcggtaagcagtcttccaagcgcagcggaagccgtggcgctgaggccgtgcagcctctgcgcggtatataccgtatcgcttgaatcgattgcggaggccataagtgcgccgtccgatgtgatgcagcgaataatcctatccaatgaaattcttcctttcggagcgttttacggagcaatatcgtccttaaaaacgccgttttgtgagtttgtgatgtgtgcggcgaaaataatgcgctgctcctccggcttcggcgcgtcgaaagagaggtcaccgaagacctccaccctatcaaagccggactttttcagcatttccgtcagcttctccacgctgtatgcgtgctcaaagaaatgctcgctgctgcgcgtatagaccttaccctctttctcaaagaaatcgagagagatcgccacactgtgatcctgcggattatagcggttctgccatgcgcagtaaatatccgcaaggtcgtaaatataggtgttgttgcccagcaccttttcgtgcttatagagcgtgtttacgtcgaaaatgaaccagctgtcgttatccatgaaaaacgccacgcggtcaaatgccgcctgcacctgcgcttcgccggagaggtggttgatgctgtccagcgaacagaacaccgtgttgaccgtgccgaacaggtcgagcgtctgcattttctgacaaaggaacatcacatcggcttccatgtcgtaagccttgtccttcgcttcggacagcatggcgatggagccgtccacgccgtacacatccatgccaagcttataaagctccagcgtaaggctgccggtaccgcaggcaaggtctaagacgatgcccggttcatggtggagatgctcgagtagcttctttaaatacgccgcgcggcccttataatccacgttcgcggtcaacgcatcgtaatagcgcgcaaaaacgtcgtagccggccattagtcctcttttccgccgccggtcaacaggcgctcaaaaatcagtgtgtagccgtcgctgccgtaattcaaagagcgattgacacggctgatggtcgcagtggaagcgccggtcttatcgacgatgtcgctgtacacgtggcgctcgctgagcattttggcaaccgcaatgcgctgcgacatggctttcagctccggcacggtgcagagatcttcaaaaaatttatagcattcctcgcggtttttcagcgtgagaatagcatcaaaaaggaaatcaacgttttcatcatgcagtttggtgttcattgtttctgtgttcctttctttatgaatttgcatccgaaaacggcgcatttatgccataaagcaccaaatgcgccgtcttttcgtcaacgaggttctttacttttttattttaacatacaaaagcacaaaagtaaacaccgaaatcaagaaatttttgcacagcagtgcgtgaaatcacacatcgttgcgcacgaggtcttcataggtctcccctttgatgatgacacgggattctccgccgcgaaccatgacgaccggaggacgcgtgttgcggttgtaattcgatgccatggagtagttgtacgcgccggtggagagcaccgctagaatatcgccgacctcgggcttttgaatgagcgtgttctcctgaatgaggtcgccgctttcgcagcacttgccggctatggtcgccgtaaagtctgcgggctcgttcgccttatttgcgatgaggcaagtgtaatccgactgatagagcgcgtaacgcgggttttcatacatgccgccgtcaatagccacatatgtacgcacattcgggatggtcttgatatcgccgacggtgtacagcgtgaggccggcctcgcacacgatggagcgtcccggctcaatgtaaatatacggcacctgaataccgtactccttgcaggcagcatgcacggcttcggaaacgtcgctcatgtaatcttcatacggcacggctgcatcggcttccttgtactttacgccgaagccgccgccgaggttgaggtgtgtcagcgttttaccgagctctgtatggatcttgttatagaacttcagcatgacctgcgccgccagcacgaacggggctttgtcgaaaatctgcgagccgatgtggcagtgcagaccgatgagctctacattttcgcacgcgacggcttcctttacggcttcaaacgcctcgccgttttcaagcgcaaagccgaacttggaatcgatctgacccgtgcggataaactcatgcgtgtgggcgtcaatgccgggcttgatgcgcatggaaatggacgtaacgacgcctttttccgcagagagcttttcaatgcggtgcagctcgtttaagttatcaacgacaatgtcgcctacgccgctttcaagcgcatagcggagttcctgcattgttttattgttgccatggaaatgaatgtgttttgcatccacacccgctgcaagggcggtatacagctcgccgccggagacgacgtcgaggtctaagccttcttcggtcacgatacggcaaatctctttgcagcagaacgccttactggcatacagcgcggtgccgtttccattatagtggcgctcaaacgaagacttatagcggcggcaaacgctgcggatctcatcttcgctcatcacatacagcgcggtgccatacttttcggcaagctccacggtgtcgcagccgctgatcgtcaggtggcctttttcattgacattgtaacaatcggatacaaacatatttttcattcccttcaaaaagtggtggatctatacttcgcagctgctcagttacccaaaacggcagcttcgatgtgctgtttcagcgtctccaaaccgaagccggtctgggaggaatacgggatgaacgggatttcatgctcacggaacaggtcctcaaaatacgcgttctgcgtgttgaactgcgttttgttcagcttatcgcttttcgtacagacgacgaggaacggcaggtcacgctcgataaggaagttaatcatatcgaaatcgtccgcagtcggctcatggcgcatatcgagaatttggatgacgagcgccacgttgcgctctgcatcaaaatatccctgcatcagctttgcccagcgctgcttttcgttttgtgaaaccttggcgtagccgtagcccggcaagtctacaaagcggcactccggcagacggaaaaagttgatggtcgccgttttgccgggcgtggcgctgacgcgtgcaagcgccttgcggttgacgagcttattgatgagcgaggatttgcccacattggatttaccggaaaaaacgatctccggcaagtccgactttttgagctgatccgcgcgaccggcggcagcttcaaattctactgactgaaaattcacggtgttccccttactgtctgagtgtttgtacgccgtgcgcaggctccgggcaaggcgtattcggcttggtttctctgtttaaaagcccgggcatggcgatgggcagcacctcatcgatacggcgcaccggcacaaaccgcacgttatccttgacgacctgatcgacctcggcgagatccgcgatgttcccgtgcgggatgatgacggtcttcatgccgtttttatacgccgccatggatttttcgcgcaggccgccgatgggcagcacgcgcccctgcagcgtgatctcacccgtcatggcgatgtcgtacgcgatgggctcttcgcacagcgcggacgtgacggcggttgccatggcgataccggcagacggaccgtccttcggtacggcgccctccggcgcgtggatgtgaatatcctttttcgcgtagaaatccgggctgatgccgagcgtttccgcgcgggtgcgaatgcaagtgatcgccgttgtggcggattccttcatcacatcgccgagcgagccggtgagctgaattttgcccgtgccgttcatcacggcaacttcgatgggcagcagctcgccgccgacgcttgtccacgcaagaccgttcacaaggccgatctcgtcgcggcgctcttctttatccttcgcaaactttgccgggccgagcaggtcttcaaggtcggcgggcttcacggaataagacttgaaatcttcctccgtgacgatgcggcgcgcgactttgcggcaaatggtgccgatggtgcgctccaatgtgcgcacaccggcttcgcgggtgtagtcttcgatgattgcgtgcagtgccttcggtgtaaagcgcagctgcgccgccttgatgccgtgctttttcagctgcttgggcaccaaatatttcgaggcaatgtggaacttttcctccgccgtgtagctgccgagcgtaatgacgtccatgcggtcgtagagcgggcccggaatggcggaagcgtcgtttgccgtggtgacaaacagcacgtggctgaggtcgaacggcaggtcgatgtaatggtcctggaacgcgctgttctgttcgggatcgagcacctcaagcagcgatgcggacggatcgcccttgaagctctgaccgagcttatcgatctcatcgagcaggatgagggggttattcgtgcccgcctgcttcacagccgccataatgcggcccggcatggagccgacgtaggtgcggcgatggcccatgatgtccgcttcgtcgcgcacgccgccgagggaaacacgcacatatttgcggccggtcgcctcggcgatagagcgcgcaatggacgttttgccaacgcccggcgggccgacaaggcaaatgatctgccccgtcgcctggtcagagagcttgcgcacggcgagcgtctccaaaaatcttgctttaaccttttccatgccgtaatggtcgcggttgagaattttctccgcgcggtcgaggtccaagcgctctttggagctcgtgttccacggcagctcaaggcacgtttcgaggtacacgcgcatgacggagccctcatgcgagccgtatggcattttggcgaggcgatcgcactcttttaagagcttttcgcgcgcgacctgcggcaggtttaatttttctattctctggcggaattcgtcggattcctcctgcgggttatcctcttcaccaagctcgcttgcaatggcgcgcatctgctcgcgcagcatgtaaacgcgctgattttcatccatttgctcctgcgccttttgcgaaatctcacgttcgagcgatagtactttgatttcatcgctcaaaatatcattgagttttgcaatgcgcttttccgggtggagctcgtcgagaatgcactgcttctgctcgaaatcgagcgagatgttcgctgcgataaagtcggccaaatcaccgcagtccttctgctgcataacgccgagcagaatatccggcggcacctgacggaaccagcggatgtactcttcaaatctctcctgtgcaatgcggctgagcgcttccgttcttgcggtgtggcgtgcggcgatcggcttgcacacgcacacgctgcccgtgaggtacggctcattttgcacaacggacataatctccgcgcgctcgatgccttccacatgcaacttgatgccgttatctgcggtgtgtaccacctgcttgatgcgggcgacgacaccgattttatagaggtcttccgccatgggctcgctttccgaaaggtcagtctgcgtgacgatgaacagctcgcggctatccgtatccagtgccgctttggcggccagaacggacttttttctgccgatatcgaactgcacgatcatgccggggaacacgacgagtccgcgtacggcgagtaccggcagaactctctcttcctcaagtatggtttctttcataaaattatcaaatccttataaatcagacaaggctgcgcagcagggatcgctgcacagcctgtatgatgatcactatgatgccgaatccttgcgagcgcgccgtttgggttgtgtcattttgatctttaccgggacgcggtcgggattgtgcacgatttcaggcgcagcgccgttctctaccgaatccttggtaacggtgatcttttcgatcgtataatcgctcgggacctcaaacatcaggttcttcagcgtatcttccataatggaacgcaggccacgggcgccggtcttgcgggcaatggttttttccgcaatggcgtcaagcgcttcgggtgtgaactccaaatcgaccttatcaaggtcaaagagcttcttatactggctgacaaggcagtttttcggctctgtgaggatgcgcacaagtgcggctttgtcgaggtcgctcagcgcggtgatgaccggcagacgaccgacaagctccgggatgaggccgaacttgacgaggtcgtgcggggtaacttctttcatccactccgtgttatcaagctcgtctttgctcttgatgaccgagttaaagcccagcgtctgcgcttcggtgcggcgctgaatgacgcttttaaggccgtcgaacgcaccgccgcagatgaagaggatgttcgaggtatcgatgttgatgacctcctgctgcgggtgctttctgccgccctttggcgggactccggcaatggtgccctccagaattttgagcagtgcctgctgcacgccctcgccgctgacgtcacgcgtgatggacgggttttcggactttctggagatcttatcgatctcatcgacatagatgatgccgtgctcggcacgctcaatgtcgtaatctgctgcctgaatgagacgcagcaggatgttttcaacgtcttcgccgacatagccggcttccgtcagagtcgttgcgtccgcaatggcgaacggaacgtccaaaagctttgcaagcgtctgcgcaagataggtcttgccgacgccggtgggaccaagcagcagcacgttgctctttgcaatctccacgccgccgtcttcaccgctgaagaaaatgcgcttatagtggttatagaccgccaccgcgagcgtcattttggcttcatcctgcccgatgacgtattcatcgagctgctttttgatctcctgcggcttcggcagcaccatttcggcgcgcggctcgtttttcggctgcgggcggccgcggtggagagaatcttcatccgcgatgatgtccatgcagagctctacgcattcgtcacagatatacacgccgttgccggagatcaggcgctttgcctgcgactgcggcttcccgcagaaggagcagcgcacttcgttatcatttccgaaattattcggcatgaaaacacgccctttcgttatttcgatttcgttgcgataaccttatcaataaggccgtactccatggcctgctgtgcggtcatgaagttatcgcgctccgtatccttgcagatgacttcgtacggctgacccgtacgctctgcgaggatggtgttgaggctcttcttcttctgaagaatacgttctgcctgaatctggatatccgtagcctgaccctgcgcaccgccggacggctgatggatcataatctcggcgttcggcagcgcataacgcttgccctttgcgccggcagccagcaggaacgcacccatggaagctgccatgcccatgcagatggtggaaacatcgcacttgatgtactgcatggtatcataaatcgccatgccggccgtgatgacgccgccggggctgttgatatacaggctgatgtccttatcggggtcctgaccctcgagatacagaagctgtgctacgacaaggcttgccgtggtgtcgttcacctcgtcgttcagcatgatgattctatcgttgagaagacgggagaaaatatcgtaggaacgctctcctctgctcgtctgctccacaacataaggtaccaaactcatcgtacaaactcctttcgcgcttcttttgcttcgcccgctgtccgatgcagggacagcgggcgaaagaagcgatatatgatatgctgttactataatactaaccgtaaaggcggtaaattattcctcggtcttagcttcagctgtttcctcggttttttcttccgctgccttcttggtgctctttcttctggtggtcttctttgccggcttttctgcttttacggaagcgttttccttaacaaagtcgatcgccttctggtttttaaggtctgctctgatctgcgtctctgcaacgaggttcttgatctgcgcgacttccatattgtactgctttgcgagtttctcgtattcttcctcaacagcctcatcggaaacttcgaggttctcaagctcagcaatcttctcaagtgcgagtctcagcttaagctgcttctcggactgcggtctgaactgctccttgatggcgttgacgtccatgccggtgtacttgagataggtctcgaggttcagtccctgagactggaggcggtatgcgaagttgttgatgctctcctcaacttcctgctcgtacatctcttccggaatctcgccctgtaccttctcgatgagtgcatcaaagatctggttctcaacgttcatctcttcctgcttctcgcggtcgctctgcagcttctcgcggaggctgttcttgtactcgtcgagcgtatcgaactcgcttacgtcctttgcgaactcatcgtcgagggtcgggagctccttgcgcttgatctggtgcagcttgatcttgaaggtcgcgtccttgcccttgagctcttctgcctgatagtcctccgggaacttcacgctgatctcgaactcgtcgccgacttcatggccgacgacctgatcttcaaagcccgggataaactgaccggagccgagggaaagctcgaagccttccgctttgccgccctcgaaagccttgccgtcgcagaagccctcgaaatcgatgactgcggtgtcgcccgtaagcgcgcctctgttatcgacgtcgaccattctggagtttctgtcctgaacctttacgagctctgcgctgacgtcttcatccgtaacttcgacattcttcttcgtagcctcgatgcccttgtagccttcaatggtaatcaccggcttcacaacaacggtgagcttcagctcgatgccgttctcgcgggaaacggaggtaacgtccgcattggaaaccgcgatgacttccagaccggaagcttcgatagcgtcctgcatagccgggcgatagagcttgtccacagcagcttcaaagaacacgttttcgccgtacatcttctcgatgacggatctcggagcatgacccttgcggaagcccggaacagacatcttcttgccctcggtctttgcgacctcggagagtgctttgttgaaatcttcagcggagatttcgacctccagctcatacttgttggtttcggttttgttggttgcctttaagttcatttccttctatcctctcaaaaataaattacaattttatttggaacacgcgggcggatatacccgtaatgcgcgataccttttgacattatagcacacctgtgccgaatattccagacaaacctttgaattttttgatattttataatttgttaaaaattcagccgatttctgcgtcttttcgcaccaatttcggggtgaaacggatataatcacacgagacaaggtgcatttttatgcccccatattcaccaagcggcgctttttttgcggcgtgatcgccgtgaatgtgcccgtagtagcactcctttacgccgtatgcctgcatcgtatccagcaattcccggcactgtgcggtatcgtacgccggcgggtaatgcaggaacacgacgggtgtgccgccgagggcttttgcggcgtttaaggacgcgatgagacgcccgttttcgcgcgcgacgatttttttatcctctgccgtttcggcgttatagagccagccgcgcgtgccgcagaccgtaatgtcccccacacgctcggcggaattgaacacgagccgcatcgttttgaagcccttttgcgcaaagaatgtctcgatcttgttgcgcgtggaccaccagtaatcgtggttgccttttaacaacagctttttgcccggcagactttcgatgaacgcgaaatcctttccggtctcttccagccgcatgccccaggaaatatccccggcgatgacgacggtatcctcttcggtaacgagggcgcgccagtttttctccagccgctccacatagttttcccagccacggaacacatccatcggcttatctgtaccaagggaaaggtgcagatcggcgatcgcgtacagcgccattttacactctgaccgtttcgcgcacaaaatctgccatatcggcagcggcgcaggtgttttcaaagcggacgggcttcgtccttaacgctgtgattggcgcagggatctttgtgtttgaaagcttcgcgagcagctcggcctccgcaaacggatctgcgggcttttcgcaatcgaacgcgtcgagcacgctgtccgggaatttatacgggcttgcagtggaagcgatgacggcgggcgtgttgtcgccggtctctttcaaatactgctcgtaaacgccgaccgcgaccgccgtgtgcgtatcgcacaggtagccgtctttttcaaacgtattgcggatgacttcaacggtttccttatcgtcacagcagccgccgtagaacagcgcgcgtacggcatcggccgttgcggcgtctacggtgtatgcgccgccgctttgcagggcgttcatccagcccgtaagcttttcggtgtcttcgccgcacaagtggtagagcagtctttccagattgctggagaccagaatatccatggacggcgaaatggtggtataaaacgcgcgctttttgtcgtacgtaccggtgcggataaaatccgtcagcacgttgttgctgttcgacgcgcagataaacttgtgtaccggcagacccatgcgctttgcatagtaggaagcgaggatgttgccgaagttgcccgtgggcacgacgacgttgattgcatcgcccatcttaattttcttcgcattcacaaggtcgaggtacgcggagaaatagtagacgatctgcggcagcaagcggccccaattgatagagttcgcactggagaacatcttgttgtgctgcgcaaactcggccttgagcgcgggatcggtgaaaattttcttcacgccggtctgtgcgtcgtcaaagttgccgtggatggcgcacacgcagacgttttcgccctcctgcgtgttcatctggcgcttctgcatggggctgacgccgttttcggggtagaacacgatcatctccgtgcccgcgacgtccttaaagccctcgagcgccgccttgccggtatcgccggatgttgcgaccagtatgaccgccgtttttccatccgccgtctttttaagcgagcgggtcaaaaggtgcggcagaatttgcagcgccatgtctttaaacgcgcaggttgggccgtgccacagctctaaaatatgtttattttcgccgtgtttatcgagagacacgaccggtgcgggggtattatcgtcaaacttaccgtcgccgtaagcgcttccggcgcacgctttaatctcctccggggtgaaatccgtcagaaagcgcgagagcacgtactcggcacggccgatatagtcgagcccgagcatgtcgtttaagtccgctttcgggaagctctgcggaacaaaaaggccgccctcctcggagataccctgtgcgatggcctgcgccgccgtcacctgaagcgcggcgtttcgtgtgctgttgtaattcatggcatccgcctcctaaatcaagtcagtcgtattatactgtattcaggcgttcctgtcaaagcgtttgaagaaagacgccgcattttcaaagaaaattttatccacaagcgcttccggcagattatgacgcaggaaaacgtttgcaatgtcctctacggattcgagacccgtaatgccatgcggcatgtcggagccgtcaaaatcgctgcccatggcgatgacgtccgcgccgccgagggacaaaaagtgctctgcgtgcgcgaacaggtcttcaatgtccgcctttgccgggtcatcgttcaagaatgctttgaaatagttgagacccacaaggccgccgcggttgcagatgatgcggaactggtcgtccgtgaggtttctcgggtgcttgcagagcaccttggagttcgagtgcgtcgcgatgaacgggcgctcggtgttttcggccacatcataaaagagtgcttcggaagcgtgagaaacatcaataacgatgccctctttttccatttccttcacggcaagcttaccgaacggcgtaaggccgaacttatcgccggacatgacgccgctgccgatctcattgctgccgttccatgtgagcgtcataacacgcacgccgttttcgcgcaggtggtgaatattcttgagatcgccggcaacggcagagccgccctctacggtcaaaataaacgccgtgccctgtttgtcgccgagcttttcgaggtcttccccggtctcgagcacggtgaacgcgcccgtctcggccattttgcggaaataggccgcatggcgatcaaaatactgcaaagccgcagcgccgcgcaccgaatcgggcagccacacggcggcgcactgcacatacggcgcaaagcggtcacccttctttacgctgacgtgcaggtcattgtcgatcaaagatttgttttggtcaagacacgctacaagcgtgtcgcagtgcaggtcaaaatagcgcatgaaaagcaccctttcgtcatttttcgcctttgaaagcgaatttgattttaataaaaagcgttttcgagatattcgatcttgactaacgctccgttttcggtaaacacggcagcggcgtcaaagcgcggctgcaaattcgtttcgtggttgatgagataatactgtgccgttttgatgaccttcgcgcgcttagagggcgtaatggcttcaaacgggtggctgaggccgtctgcgctgcgggtcttcacctccacaaacgcaaggtaacggtcattctgcgcgatgacatcgatctcgccgaagcggcacttgaagttgcgctccacgatctcgtagcctttttcttccagatattccgccgtcagctgctcgccgaggcggccggaaccggtgtttggcatgcgcgcacctcctcagcccagaattttctttaaaaacgtcttgcggtggatggggcacgggccgaattcatgcagtgcttccacatgcactttggtgccgtagcccttgtgcttctcgaaatgatatccggggtattgctttgcgtattccagcatcacgcggtctcggctgactttcgccaagattgatgctgccgcgatgctgggactttttgcatcgcccttgacgatggtctcgcccggcacgggcatgggcggcatacggttgccgtcgatgagcacataatcgcacgctttctgcatattgtcatacgcacggcgcatggcgagatatgtcgcctgtaaaatgttaatctcatcgatctctttttcgtccgcaaagccgataccgtaagcgacggcattttctttaatgacgtcaaagagcgcctcacgctttttttcgctcagctttttggaatcattgatgccgtcgatgacaagcccctccggaagccacacggcagctgcgtaaacggggccggcaagcggaccgcggccggcttcatcgataccgcagacggcggtatagccttttaaataggcttcctgttcgaaggaataatccatggaattttcctttccgatattactttaacgggcggccgacgggctctaatgtaatgcgcccgagcttgccgccgcggtattcgtccaacacgttcacggctgcgcgctcggtatcgatttcgccgccggaaatgagcataccgcgctttctgccgatgcgctccagaatttcgtggcccttaagttcttcttcgggacgaatatccgttttataacgcgtgttgacggcttcgggatataagtcctgcaaaagctccaacaggcggtaagaaagtccctcaatgtcgagaatttcgtcgcgcacggcaccggtgaacgccaaatgttcgccgacgaccggatcttcaaacttcggccacagcacgcccggggtatcgagcagctcgagacccttgccaatcgcgaaccactggttgcggcgcgtcacgcccggtttatcctgcacggcagctttgcctgcgttgccgcccttacaaaggcggttgatgagcgacgatttgccgacattcggcacaccgacgaccatgatgcggatgggtctgcccaccatgcccttgcgttcccacgcagcaatttgctcacgcaggatgtttttgatctccggcagcaagcggtttaggcccttgccggtcttgcagtcgatcgggatggcgacagttttatgctgtttaaaataatccatccactccgccgtgcgggcgggatctgccatatcgaatttattcagcagcacgattttgggcttattgccgatgatgcttttcagcaccgggttgcggctgctgacggggatgcgggcatcgataagctccgcgacaatatccacaagctttagactgctttggatggcgcggcgcgttttcgccatgtgacccggaaaccactgtaccgattgtacttcactcatactgtatcctctctgggtatcttgttttcttagttgttctcattcgttttcacaaaaccgaagcgatcgaacgggtaaagcgtgaacacggcttctcccatgatatggcgcgtgtcgatcatgccgatctccgcataacggctgtcccttgatacggtgcggttatcgcccaaaacgaacacgcagcccttcggcacggtctgcgggaacacgagcgcttcatacccgtcatacggatggaacgtgatgccgttttcaatgccgaactgcgtttcgttcagcgcttcgccatcgatatacacggtgccggtgtcgtaatcgatattgaccgtctgcccctccgttgcgatgacgcgcttgatgatgggttcctccaaaacgttcgtgacaacgaccacggtgccctgctctatgtcgtgcccgaggttcgtgacaacgaccttttcgccctctacaaaattcggcagcatcgacttgcccgtgacggtaacaacacggaacaggaacgtgaacacaaggatgacggccacaagcgcaaagacaatctcctccagccactcatacatggagcggacgcctttagacgcggttttgatgtttttttccatgcagctttcaccaatttctgtttttacagtgtattatttctatataaagtaaaaaagggacaaagcattgccccttttactccgtttgctattcgatttagcgaacctggctcttgaccttagcagccttaccgacgcggtcacgcagatagtagagctttgcacggcgaacacggcccttacggacaacgacaatgttcttcacgttcggggaatgcagcgggaatacacgctccacgcctacgccgtaggaaacacggcgaaccgtgaaggtctcgcctacaccggaacccttgcgggcaataactgtgccttcgaactgctgaattctttcacgctcaccctcgcggatgtttacgtcgatacggatggtatcgccaacgttgaactcaggtgcctgctccttaacggaatcggcagcaataagctttaatgcgtccatttgatcttcctcctgataatttttcagacattcatgcggtacgcgccgcagaggactgtccgcttcaatgacgcggtttgcaccgtgcattgatccccattggcagcgtttgagggccaacggatttcaaatgcttaaatagtttatcacaacatgcggaaaaaagcaagtgttttttaacggaaacccgcacaaagatcgcgaaaaaatgcagataaactgcgcattacgcgaaaaacagacgtgattttccgccgttttacttaaattcgcggaacgcgctgtcgaaaagccgcgtgcgctccacgcggacaagcaactcgcggttcagtacgcgctctgcggcgtccacaaagagcgtcgggttaataccgccctggttgcccgcgggcaggcgcaccgtcatttcaaggcagtttggtttttcttcaaacgtcatgtcttcaaagtacggcttgatatcgacgatcttttcgccctttttggagtgcttctttaccgtaagctccggctcggtaagcacgcgctgcatctcgcttttttcaaacgccgggtcttcgcactccagacgcaggatgtactcggcgtttgcgacatcgttgcccttcatttcgggttccgtcaccgcccacacgcggatatcgtgcggcagaccggcgttcaatttttcgatgagctccggatacggcatgtcctcgatgaggcgaatgtccatcgattcgtgacggccttcaaagccgagcgaaagcggggccgcgaacgtcaagaacacgtgcgggttaaagccctccgtgtaccacagcggcagctttgctttgtggaacgcgcgggacatgcaacggtttaaatcaaggtgcgaaatgtaccgtgccgtgccggttttggaaaaccagactctaacatcttttctcaacgcaaagacctcctttaaagcaggctgcaccgcaggcagagcatttttcgcggcagttcggcgtcgtctcagacgcataggcgcgcttacattcctcgatgagaaattcctttttaatgccgtaatcgaggtgatcccacgggaagacctcatcaaagctgcgctggcggtttgcgtagaacgcggggtctatgccgagatctttaaagacctgcatccacgcgtcaaaatcgaagcagtccgcccagccgtcaaagcgcatgccgcgcttatgggcctccagaataacggcattcagtttgcggtcaccgcgcgcgaacacggcttcgagaaaacttgtctccgcgccgtggtagttgactgtaagcttacgggagaatgtggactcgcgcaggagcttctgctttctctcgagcatttcgatggtatcctgcccgaaccactggaacggcgtgaacggcttcggcacgaatgccgcggcgctgaccgtaacagcgaccttttttcccttctgacggttttctgtctcgtagtaccaatcgataaccttctgaccgaggcccggaatgcccacgacgtcttcatcggtctcggtcggcaggccgatcatgaaatagagcttcaccttcgaccaaccgttgttgaacgcgatctgcacggtgcgtttgagttcttcttccgtgacgtttttgttgatgacgtcacgcatgcgctgcgtgccggcttccggcgcgaacgtcagaccgcttttgcgcacggacgcaattttatcgatgagctccgtggagaagttatcgacgcgcagggacggcagagaaacgctgacgcgctcgtcctccgaccacgtgtgcagcgtgtcgagcagctcgaaaagtcggctgtaatcactggtgctgagcgaggaaagagagatttcatcgtagccggtcgtttcacacaaccgctttgcctgccggttgatggtctccacactcttttcgcggaacgggcgatagaggaagcctgcctggcagaagcggcagccgcgaatgcacccgcgcagcacttcaacgacggcgcggtcgtgcacgatgtcgagaaacggcacaacgaaattttccgggaaatacatgttgtccacatcgttgcagacgcgcttgcggatggtcttcggcacgccggcgtgcgggatataggctttcacggtgccgtcttcgttgtattccacatcgtaaagcgacggcacgtacacgccttcaatctgcgccgcttccattaagaattcctgcttcgttttgccctctttgcggcacttgcggaacagctcgatgacctccaaatccacctcttcgccatcaccgaggaacagaatatcaaagaaatccgcgatgggctccgggttgcaggcgcacgggccgccgccgaccacgatgtttttgagttccgtgcggtcgcggctcaaaagcggcacgccggaaagctttaacatattgaggatgtttgtgaagctcagctcatattgcagcgtaaagccgatgaaatcgaacgcgctgacggggtcgccgctctctaagccgtagagcggaatgtcgttttcgatcatcgcctgctccatgtcgatccacggcgcaaacacgcgctcgcaccaaatgtaatcgacgttattgaagatcgaatacagaatcttgatgccaaggtgtgacatgccgatctcatacgtatcgggaaagcagaacgcaaagcgtacgtccacgtcctctttatttttaatgaccgaattcagctcgccgccgacgtaacgtcccggcttctgcaccttcggcaggatcttgtccagttttttattcagcataaaattacctttcgttttgacctttgcataacttatctattttattataaccgaacagcgggggaatttcaacacatgttcccccgctgtttcagaattaagtgtaggactacaatacatcttggacaattgaataaaaagggtatgaggaatagggcctcatgtgttaaagttaagctaccacaccaaactttccgaaaggagaccatattcctcatgagtaagagtataacacaggacatggcctacagacaatccctaatgaagtacgcagaaaagtacggcgtcagccgcgccagccggaaatacaacaagagccggtcgtacatctacttctggaagcagcgctgggacgggagtgtggcgtctctggcctgccagtccagacggcctcacagccaccccaaccagcacacggaggccgagctaaagctcatccgcgatatgcgccgccgcaatccgtcgctgggcatgatcgaactgtggcaccgtctgcggaagcgcggctacacccgctgtccggagagcttgttccgcgttatgcgcaaaatggggctgtttccggccgaaaagcccaaaaatccgtacaagccgaagccttacgagcagatgacctatcccggccagcgcgtgcaggtagatgtcaaggtcgtcccccgccgctgtatcgcagatccggagctgcgcctgttccagtacaccgccatcgacgagttcacaaggctgcgtttcctggcggcctacccggagcagtccacctattcctcggcggacttcctgcgcaagctgcgggcgtggtacgcccgcagaggcatagaagtggagtgtgtccagacggacaacggtttcgagttcaccaatcgtttctccaacagcaagcgcgatctgcccacactgttcgagaaaactgccgccgagctgggcatccgtcacaagctgatccggccctacacgccgcgccacaacggcaaggtggagcgcagccaccgtgaggatcagaaacgcttctattcctgccattcgttctattcactcgacgactttgccaagcagcttgccgtccataaccgccgcgccaacaacttgcccatgagacccctccgctggctctcgcctaatgagttcgctgtccaatatgtttgacaaacctacatgttcccccgctgtttcagaattaagtaaaataagatgtaaaccgccaaaaacaaaagcgtaaagttgtagcccgtagaaatcaaaaccgaaaacccgagcgtgccgagggtaagcgccagaaggacggacgacacggttattgtgcgctcggccgttttttcactaaatgtgccgcgcagcagacagtaaagcgcggtgccgccgtccaacggtacggcgggcagcacgtggaacgcgaacagcgtgagctgcacggcaggataagcgcgcggcagcggcaaaagcagcaggaagctaagtagatttgcaaacggccccgcaagcgacacgacggcgcgacgaaaatcgccgacgcttgccgtcttccccgccatgtgaatgccgagcgcgccgaacgtgaccgatttgatctgcatgccgcacagctttgctgccagaatgtgccctgtctcatgcaccgccaccgccaaaagcgcgggcagcacatgcacaccgccgtctaatgtgagcagcacggccagcaccgcaaaaaagccgaagcgcagcgtgagtaccgtattatgaatacggtacatcatcctgcaaaatcaaaacagagcggttcagctccgcatcgtatttggcacgcagctcgccgtatagctccggcagaaagccgcgcaggaaaaacgccgcaagcaaaatgagcacgcatacaagcgtttggaacacggtaaggcgaaagccgccgcttatggctttctgtgcggcggctctgtccttcggcacttgcgcttctgtttcggcaggtatcggctcggacggcttttcctcgtcgtttggtgtgggcgtttcgtaaaactgcatggttccctccgctacaaaatgatgcagataagcccgttgcagccatcattgatgatgcgctcaatagtctctcgcaccttgccgcgcgcatcctccggcatacgggcgagcttattgtgcatgccctcgttcacaagctcatgcagcgatttgccgaaaatgttggagccccagatctgcgacggattttcctcaaattctttcagcaagtacagcacaagatcttcggactgctgctccgagccgacgatgggcgtaacctccgtgcggatgcatgtgcgcatcatatggatggacggtgcggccgctttcaggcgaatgccgaacttgccgttctgcttgatgatctccggctcctcgagcgtcagctcctccatatcgggcatgacgatgccgtaacccgtctgcatcacgtcgtcataggcgctttgcagctttgcgaatttctttttgatctcgttcatctcgatgagctttgcgagcagggcggtttcgtctgcgacctccataccggtcttttcgccgagaattttgaaaaacagcgacggcatgggggtaagctccagcacgcacgcgccgctgccgaggtccatgcgcgcgcagcggacggttttgaggtcctcgcatgcggcgagactacccgagacctgctgcacctcgcagaccctatggatatcgcatgcgcctttcagggtatcgaaaatctcttttttgagccagtggtcatcgtcaaggtcgatgatccagccgggaatgtcgagtcgaatttcccgcacggggaactgatataaaagcttccccaaaatgccctgaatgtcctgctccgtgatgtccatgcagttcacgggcagaaccggcacgttataacgctcggaaagctcgtttgcaagcgcacgggcttcgttcgtattcgggtaaacgcagtttaaaagcacaatgtacgggcggttcgtggactttaattctgcaatgacacgcgcttccgcttcctcgtattcctcgcgcggtatgtcgctgatgcttccgtccgtcgtgatgacaagcccgatggtcgaatgctccgtgatcaccttctgcgtaccgatctccgccgccatgttgaacgggatggggtcctcaaaccacggtgtgcgcaccatgcgcggctgctcctcttctatgtatccgagggcgctcggcacgatgaagcccacgcagtcgatgagccgcaccttaaactccgccgtatcatccatttttacggtgacggcctgttcggggataaacttcggctcggtcgtcatgatggttcggcccgaggcggactgcggcagctcgtcgacggcacggtcgcgcgcggcctcatcttcgatgttcgggatgaccgtcgtgtccataaatttcttgatgaaggtcgatttgcccgtgcgcaccgggccgacgacgccgatgtaaatttcgccgttcgtgcgcgactgcatatctttatatacgctgaatgcttccatagccatatcctttccgctgtcttattttcggcagatgatcacagggcggtcttcgctcaaaacgtcttccatacagtcgttatgcgtgcggatggcgctgacgcgggcgtggtagcgttttgcgatgtcccagaccttttcgccgcttgaagcgtaatacaccgccgcgcagcagggctccggctcggtggtctcatcgagctccgcgctttcgagtgaccgcgcggcgtataccacgcgcacctgttcttccatgcgcagctctgcggtgcactccaccgtgctgctgtccgtaatgacatactgcacagatgtaatctcgccgcgcacactgcggcgtccgacgatttctgcggtatggacatcggtgaaatcgagcatacgctccgtgtaggcaatctgcttctctttcgtgcggtataaaaggcacacggtgaatttgccgcgcacagcggcgttttctttttcggtaaacgccgtcagcgtgaggccctcacaccaaatgtcgagcacctgctcgaggtcgttttcgggaacgagtacgttctccttcacgcgcacgctgcgcggcggcagcacctcacagcgctccagtgagagattcttgtatttcgccgcccacgcgccctttatggaatacgcgtcgcacacggtgcgcacggtacacgactttgtaaactgcacgcagaatgtgggctttaggtaaagattcagcacggtatattcgcccacgctgtcctcacgcggctgcacggtgcattcgccgccaagcacggagatttgtatggtacagtcctcccccgcgccggcgcactccactgtctgcgtaaacggcaatatgcacgaaaagcgctccggcatggcggtatcggaaaacgtgcggtataagatttccacacacgcctttcccgtgacgaccgcgccgcccgcctgtggctgcaccgtatcgatctgataccgcacactgcagcgcaaaacggtctcaataggcgacttgccgtttggcagctctgcattctgctccaaaataaacgcgtgcatcacgcagcccacggcgcgggtaacatcgtattcttcgcactttgtttccacacggtcatccgaaatgcagtctgcaatttcaagctgccgcacggcgtaagcacgcacggaaagtcccaaagtgatgtgcagatcgaccctgcgggcgttcatggcgcggcaggtcatgtgctgcacgaacggctccgcttccgccgttacgttttccgcctgtgcacgcagccgcaccgaacaggtgaactcctttttcgtatcgaacccgcgcacgcagccgccttttgcatcaagatataaaacatgcatggaagcgcagccgtcgatcgtaaggctgtcccctgccgccgaaacggacgtgacctccggcgtgacgatacattttaaaatcttctggatatccgcacagtaatccggcagggtgtattccgtatctacggggcactcctgcacgccgtcaaaaatctgttcaaagccctcatagcgctctgtgtttgtttccatccgcataagctctgtaaccttcctttcgctgccctttgtttcgctacattgtatgagcggaaagcggacaatatgaccgcccctttaaacggaaagttcacagtctgttccttgaaattaaggacctttcgtggtatattcgtgtagaagaaagaaaaaactgccggaggtttactatgtctcaggtcacaaagcgtgcgcttgtcgcttcgcttaaaaatcagttgcttaaaaagccgctcgataaagtcaccatcagcgatattacagatgactgcggcatcagccgcatgacgttttactatcactttaaggatatttacgacctcattgaatgggcatttgaggaagaagccagtcgcattttggagggcaaaaaggactacgatacttggcagcaaggctacctgcgcatttttgaagatttgaacgcaaacaagccgtttatcatgaatgtttaccgttccatcagccgtgaaaaggtggaaaactacctgtaccgcatcacctatgatcttcttatacacgtgataaacgaaaaagccaaaggcatgaacgtgcgcgacgaagacaagaaattccttgcaaatttctataaatatgcctttgtggggcttgtgttggactggatcaagcacgacatgaaggatgacccaaatataatcgtcgccgacctttccgttgcaatacacggcagtgtttctgccgcgctggaacggtacagaaacgcttaaatttggaatcatacgggcagcgctgtttgagaatatggcgctgcccttttttatcaaaacgccgttcgtgataaaaatttatacgcatttgccgccgtgtttaaaaactgaacacggcggcttttctgtatattgttctatacaaaaagacatgataagatgtaggcacaaaaacaaaagaaacactttaggaggttttttatatgtattatgcaagcggcaactatgaagcatttgcaagaccgaagaagccggagggcgtagaccaaaaatcggcgtatatcgtcggcagcggtctggcagcccttacagcagcgtgctacctggtgcgcgacggccagatgaaaggcgagcatgtgcacatcctcgaaaaagagcagctcgcgggcggcgcatgcgacggctggaaatttgaaaacgtcggctatgtgatgcgcggcggccgtgaaatggacaaccactttgaagtcatgtgggacctgttccgttccattccgtccattgagaccgagggcgtttccgttttggacgaatattactggcttaacaaagaagacccgaactactccctgtgccgcgcgaccgtgaaccgcggcgaggacgcctacacggacggtaagtttgatatttccgataagggcgctatggagatcatgaagctgttcttcacgccgaacgaagatttacagaacaagcgcattacggacgtattcgacgacgaggtgctgaactccaacttctggctctactggcgcacgatgttcgcctttgaaaactggcactccgcactcgagatgaagctgtacatccagcgctttatccaccacatcggcggtctgccggatttcaaggcactgcgctttacaaagtacaaccagtatgaatccatgattctgccgatggtgaagtaccttgaaagctacggcgtgcagtttcacttcggcgtgaaggtcacaaacgtcgagtttgactgtaacgaacagcgcaagcttgcaacgcgcatcgacacgctgcgcgacggcaaggaagagcacatcgacctcaccgaaaacgaccttgtgttcatcacgaacggcggctgcgtggagaattcctctatcggtgaccagaacacgccggctaagttcaataccgaaatccgcgagagcggcggctgggatatgtggcgcaaaattgccgcgcaggacccctctttcggtcacccggataagttctgcagcgatcctgagcagacgaactggatgagcgccaccgttgagacgctcgacgaccgcatcattccgtatatcaagaacatctgcaagcgcgacccgttcaccggcaaggtcgtcaccggcggcattgtttccgtaaaggactcctcctggcttttaagctggaccatcaaccgccagccgcagttcaaagcacagccgaagggtcactgccttgtgtgggtctatggcctgttctccgacaagcccggcgattacgtcaaaaagccgatgcgcgagtgcaccggcaaggagatctgcatggaatggctgtatcacatcggtgtaccggaggatcagattgaagatcttgcggagacgagcgccaacaccgtgccgtgcatgatgccgtatatcaccgcattcttcatgcctcgcgcatacggcgaccgcccggacgttgtgcctgcgggcgctgtgaacttcgcgttcctcggtcagttcgccgaaacgaagcgcgacaccattttcacgacggaatactccatgcgtaccggcatggaggccgtatacacgctgctgaacgtagaccgtggcgtgccggaggtctggggcagcgtatacgatttacgcgcactacttgatgccaccgttaaactccgcgacggcaagaaagtgaccgatatggacctcggcctcatcgagcgccttgttctgaaagaagcgctgaagaaaattgagcatacggacattgaaaagctgctcaaggaatataacgtgatctaagctttcctaaattcaatcataacgtaatacgcaaaaggctcactgttcccccgcagtgagcctttttgttatgtgcagttttgtgttatgtctcttgcggcagctttctgatgccgaacatatgccgcagcatgaagccgatgaaccctttgccgttgacgatgacgaccttcataaaataccgttcctttccgagatcataatgtgcgcagcaccgctacgccgagtgcgacaagaatcacggcggcgatgaacagcacgagcccctccggggagatctgtgcaagcaccatgccgagtccgaatgaaacggcgcacagtgcgcgcagttttcggtcccgaaagcatgggttattgcagcatttcggcattcgcatagaaaagcacctccgtttaccgaagctcccttacggggtcattccagtatatacggaggtgcatcatttggttacggattatttttcggtatcttttttgtcttccgtttcgggcaggcggctttgaatctcgctttgcggcggttctgccggcatatccttcggcgtgtagacaatgacgagcgcacagccgatgttcacgcgaatttccgcacggtcggagatgatgcagttgctcacgcccattaaagacgaacccgcagagaggtcttttttctccagcggatactgaagaccctcatacgtcaggttgcaggaagagccgtcaaacgggaacacggagaccgtggcgcctttcagctccgtcagcacaatgcgcccacagcgcacaacgaacactttggtgtcttccgtacacagcaccgcgctgccgccgcgcttggagatatacaaaagcacatcgaggttcgccatggagtgatcgaagcggtcgccgccgaggccgccgataagcacaaatgtcttgtagccgagcttctgccccaccatgacggcgcccatcatatcggtaacgtccttttcaacggggagcttaatggtgcggatcgtctccggcggacgctttgcggcggaatcaaaatcgccgatgacaaggtcggggcgaacgccgtactgcacagcggtgtcgtagcccgcatccgcacagatgacgtagtgctctttcggatcgaattcttcaaaaacggcgccggacgccagcggagccgcgccgatgatcatacattttttgtctttgataactgccattcctttatgtccttcacttcgttatacattgcaatgtaactgtctatgcgggagcgggaaatttttccctcttccacagccttcaataccgcgcagcctttttcgcaggtatgcgagcaggaggtaaatttacattcgccgaggtacggcgcaaactccctgaatccctccggcagctcctccttgcggaacagctcgtagcgctcaatatccatggtggaaaagccgggcgtatcggccacatagccgccctccacggggtacagctccacgtgacgcgtggtgtggcggccgcggccgagctttttgctggtctcacccgtcgcaagctccagctccggcacaagcaggttcaaaagcgtggatttgcccacgccggagttacccgtaaatgcggagatgcagcccgtaagctccgggcgcaggtcatccacgcccacgccgtccgccgccgagacgaagtagcaccgaatgccgatgctgccgtaaatgtctttcagctccgtcgtatcgcttaggtcggtctttgtgaacacgagcacaggctcgatgccctttagctccgccgcggcgatggttttatcgatgatgagggtgctgggctgtgggtcgcagacggaagacacgacaaacagcttatcgaggtttgcaagcggcgggcgcacaagaaagtttttgcgcggcaaaatctcctgcacgtaaccctcatcgttcgcgtccacttcaatgcggacgcggtcgccggcatacggcgaaattttatctttacggaacttgcctcttgcgcggcaggcgtgcaacacatcgccgcaatgcacgtagtagaacccgccgatgcccttgatgaccagcccttctttcatttcgcccatattaatcttcgtgcgccgtgaccgagccgtcggattcactcatgtcaccgccgttgtccggcgtcggggtcggttccggctccggcgttgcatacgactgctgcgaggtcacgttgatgctctgcgtggtgtaatcaatctccgccgtgatatactgctggtcgttcagcgtgatgacaaggttcgcgcggtctttgcccgtgaacgtcatgttggagtacggagaagtcgaggggttcaccgtgcgcgtctcaatgagcgtaccgtccacgtagatcttcatcgtaagatcatccgatacaccgccgggcagcggaatatcgtaatagacatctttctgtgcgcccttgccggagctgaccgttacggtgacgaccgagcccttcttcgccttttcgccctcgttcggggaaacggaaagcacggtgttttcgtccttgtcactctcgtcgtcgtattctgctgtgaccacaaagcctgcggcttccagctcctctttcgcggcgctgtactggtagccgacgatgttcgggatcacggcgctttccgtagacgggccggagctgacgtagattgtgaccgtggtgccggtagaaacggtagagcctgccgccgggtcggtcttgacgacgtaaccgactgcggtgtcgtcatcggcgactgcctgaatcttcggcgaaaggttcagtgccttcagcgcgtcatacgcatcctgctgcttatagcccttcacgtcttccacaacgacctgctcggcctcgccgttgacggtgagcgaaacggtcttgcccttttttacggtcatgccggccgccggggtttggcgcagcacctcgcccggctgcttgctgggcacgttgccgtaggtgatctcaaacgtgaggtccgcatattcactgttcccctcaatatcggacgcataaatcttcccgacaaagtttggcaggacgatctcatcagaggtcttgtttgtggaggccgtcagattctgaagataccgccaaccgaaaatgcctcctaccacaagggctacaacaatgacagccgccacgatgcccttgatgatgttggaagcgcgcgcgccgtttttggaacgcacatattcttcttcatactcgtagttgtcgttatacttctgcggcgctgcgttctgctgcacgttgccgtaaatatccgcagaggtgcccgcatacgcgcggtcaacctgctcgccgtagcggaacacaatttccgggttgcggcggaagcgctccacgtcctccagcatatccgctgccgaggggaagcgctgcgccgggtttttctccatggcgtgcatcgtaatctcttcgaggcccttcggaatggacgggttgatgcgcgagggcggtgtgggctctgcctgcatctgcatgatagcgacggaaaccgcgttatccgcaacgaacggcagctgacccgtgagcatttcatacagcatgacgcccacggaataaatatcggccttatcgttgatataaccgccgcgcgcctgctccggcgcgatataatgcacagagccgatggccttgtcggtcatggtctgcgtttctgcctgcgagaagcgtgcgatgccgaaatccgtcaccttaatggtgccgtcctcgagcagcatgatgttctgcggcttgatgtctctgtgaatgatgcctttttcgtgggcgtgctgcaaagcgcggaggatttgcaccgtaaagtacagcgcctctctccatttgatctcgccctgctgctcaatatactgcttcaaggtgatgccatcgatatactccatgacgatgtactgaatgcggtcaccaaagctgacatcatagaccttgacgatattcgggtgcgaaagcaccgcaatggctttcgattcattgcggaagcgacgcagaaaatcgctgttgcccgcaagctcttcctttaaaattttaatggcaacccaacgcttttcaatattgtcatacgccttatacacatacgccatgccgcctacgccgagaagctcgtggatctcatagcggccgtctaaacgtttaccaatatatttatccattctttttcatcctttctcagcggttctcgatcaccgcgacggtcacattatcgctgccgcccttgctgtttgcatagcggatcagctcatcggcgagttcttctccctgatagttgctgatgaaaagcagcagcgtgtcgcgctctaagtaattgctcaggccgtctgtgcaggaaagcgccagatcgccgggctcgaatttgtagcagccgtaatcgcactccacctcggggtgcacgcccacaacgcgcgtgatgaggttgcgctgcgggtgcacacgcgcttcgtcctccgtgatggcaccgctttccacaagctgctgcacaaaggaatggtcggtcgtaacctgttttacgccaagcgccgtctttaagtagcagcggctgtcgcctgcgtgggcaatgtgcagcacgccgcccgccgcaatgctgacgacgaccgtggtgcccataccgtttaaggccgggtcttcctgcgcgcggtgcagcaccgccgcgttcgcgtcattgattgcatgcagcattatgtcgcgcactgcgtcttcttccatatccggcgtgtagttttccgtgatcgctttgcagatggcgtcgcaggcaacactgcttgcaatgttgccgccgtttacgccgcccataccgtcgcaaaccacggtccacgcgctgccgtccgaaaaagtgccacagcggcagatgtcctggttagagctgcgcacctgtccgatatccgttttgcataccgcgtacattagactgtacctccctgttcattgcgtcgacggagctgtccgcaggacgcttctatatccgatccgagcgtgcgccggacggtagcggtgatgcctcgtttttcgaggatcgccgtgaattttctgagtctctcctccccgcttttgcggtagcccgtgccggtgacgtcatttaccggaatgaggttcacgtgggcgatgatgccacgcaggcgggatgcaagctcgtttgcgcagacatcgctgtcgttcacaccgctgatcatagcgtattcaaaggagatgcgacggcccgttacgtcggaataatagcggcaggcttttaagagctgctccacgttccacttgcggttgaccggcatggtgcggcttctgatctcgtcgttcggcgcatgcagcgaaacggaaagcgtcagctgcagcttgcggtcggcaagatcgtaaattttttcgacaagcccgcaagttgaaagcgaaatatgccgcatacctatattaagcccgttttctgacgaaacaagctccaaaaatcttaaaacattcttataattgtcaagcggctcgcccatgcccatcaaaacgacattcgagatgcgctcgccgatgtccttctgcgccgtttggatttccgaaatcatctcgctcggcaaaagatcgcgcgaaaagccgcttttgcccgtggcacagaacgtgcagcccattttgcagcccacctgtgtggaaatgcaaatggagtagccgtgtttatatttcatgaggacggattcaatcatctcaccgtcgttcaagcggaaaagatactttttggtgccgtctattttggaaacgcgccgaatggcgatctccgtatttcgtatttcaaagctttcttttaaagcgacgcgcagatctttggaaaggtccgtcatctcgtcaaacgaggtcgcgccgcgctgatgtagccagcggtatacctgtgctgcgcggaatttttgcaagccgcgcaaggcaaagtcctcctgcagctccgaaagcagcatggatttaatatcggtcaacgcttcgtctccttccctgtttctatttttctgcgcatggcggcggcgaaaaagccgtctccgccgtggtccatgggcatcatggtgcgcatgaatttcggttcgttcaccgtgtgggatatgccctccgtttcgggcagatcatacggttcaaactccggatggcactttaaaaattcggtcaccaccgcgccgttttccgcattgcgcaacgtgcacgtggaataaaacagtataccgcccggacgtacaagctgtgcggaatgctccaaaattttgagctgcaacgcaggcaactctttaaagctctcctgctttttgtagcggatttccggcttgcgtcgaataaccccgagtccggagcacggcacatcgcacagcacgcggtcgtactgcttttcacacacaccggtcgcggcatcgcgcacggcggcgtgaatgaggctcaagcctaatctctccgcgccttttttgatgaggttcacgcggcctttgtatagatcgaacgcatcgagcacgcctgtgttttccatgtattccgcaagcgtgaagctcttgccgcccggcgctgcacagacatccgcaagccgctctccgggctgcggtgaaacaaacgcacacaaaagctgcgaagaaagatcctgcacatggaatttgccttccgcaaagcccggcaaaccggtaacatcgcccgtgccgtgcacgcaaagggcgttttggagcaccgctttctccgcggtgttttccggcagcgactgtatcaaatcgtccaccgtggtcttgagcggatttatgcggatatacgtttccgcccgctcggacatagcctttaacaaatctatgcaaacggtctcgccgtaatcctttttaaagctctcgatgatcggctgcggaatgttatagcgaacgctgaggtcatcttcgggaatgattacctcatgccaaccgcgcgcaaagctgcgcagcacaccgttcacgaagtttttatactgcccgcgccgatattctgccgcgcacaaaacggcttcgttcacggcggcggaatccggcacacggtcaaggtacatcatttgatacacggcgatacgcaagatgttgagcaccgtgccgtccagcttctgcttcggttttgcgaggaacttgcgaatataaaaatcgagcgtcagacgcttttccaaaacgccatagaaaatggtagaggccagcgccgcgtcgcgcggagaaagctccgccgcgcgaatggctttatcgatgacgatgttcgagtagccctcgttttccgtcacctcggaaagcgccgtaagcgccgtttttcgggaagaagtcgccatattactgaaccttcgcctttgcttctatcgcgtgaccgcgcagataatcgctgccgcgcatacgcttgccgttttccggctgaatttcaatgagctgcacggcattttcgccgcagcaaacggccatttcgccgccgatcaccgcaatttcgcccggttcccctttgccgacaacgactttcgtcctgtgcagcttcatgcgtttgccctctagcgtgaaaaacgcggacggccacgggttcaaaccgcgcacaaggtcgtgcacgcgctcggcgggctgtgtccaatcgattgcgcccatctccttacggatcatcggcgcgtggattgcttccgcatcgttctgcggctgcggggtgatggtgtcgagcttatcaatggtatcgacgagcagctcagcaccgagcaccatcaggcggtcgaaaagctcgcctgcagtctcgtcttcaccaataggcgtttccgctttcgccagcatgtctccggtgtctatgccatctgccatctgcatgatggtcacaccggtgattttatcgccgttcagcaccgcccactggatcggcgcggcgccgcggtacttcggcagcaaagagccgtgcacgttgatgcacccgcgcggcgggatgttcagcacacgcggcggcagaatctttccatacgccgcaacaacgataagctccggcgcaagcgccttcaaatgcgctatttcgtcttcattatttttaaatgtcgtcggctgacgcacttcaatgttgtgtgccattgccgtttcttttacgggcggcggcagcagcttgtgccccctgcccttcggcttatccggctgggtatagaccgccaaaatctcatggccgcgctccagaagcgcgttgaggctcggtacggcaaaatccggtgtgcccatgaatacgatgcgcatggaaattcctcctttttctctaaattctgtcttagctttccagctcgtccggctccagcatgcggctggcgcgcgtgacaaagcatacgccgttcaggtggtcaatttcatggcagaacgcacgggccagcagctctgtgccgctgatttcaaacgtttttccgtttctgtcctgtgcgcggacggtgacgttcatcgggcgcttgaccatgccaaactcacccgggaacgagaggcagccctctgcgccgtcctgctcgccggaggttttgatgatttccgggttgataagctcaatgcggccctcgccgacatcgataacgacgatgcggcgcagcaaaccgacctgcggtgcagcaaggccgacgccgtttgcgacctccatcgtctcgtacatatcgtcaagcagcgtacaaagcttctcgtcgaatttttcgaccgggcggcacattttggtcagcacgtcgtcgccctttttcacaatatttctaagcgccatttgcggcactcctttcctgtgaatttaaatttctgttacaaaatcgcatcggggttcgggtctgcatacgcggtgacgctcaaaaaacgcttatcgcttgaaaacgtgctcaaaagcatcgcaatggcatcccgaaacgccttggaattcttgtatttcatgacaatcttatatcggtatttgccgcccatacgtgacacggatgccgcagaggcgcgtaataaacgcagcggcaagttgggatagtcccggcggaacgtctctgcaagcagcgcggagaaatgctccgctgccgcacgcacggtgtcttccttttcgcccacaaagccgatctgcaaaagatccgcaaacggcgggtacagcatggcccttctgaaacgaatttccgtttcaaaaaagctttcgtaatcctgcgcggcggcaaggtgcaggtacgggttttccggcacatgcgtttgaatgagcgccgtgccgcggtagcgcccgcgccccgcacgccccacgacctgtgtaagcaagtcgaatgtgcgctcgttgctgcggtaatcatcgctgtataaggactgatctgccgaaagtacgccgacaagcgtgacgttctcgaaatcaagcccctttgcaaccatctgcgtgccgatcatgatgtcatactcgccgtttgcaaatgcgttgagcttcttttcaagtgcgtatttgttcgcggtggtatcggtatccacgcgcaggatgcgcgcctccgggaacgcctcccgcagctgatcctccgccttctgcgtgccgccgccggaaaaggtcagctcaccgccgcacgccttacagcgcacgtaagccggttcggaatggccgcagtagtggcacatcaggcggttattcgccgcgtggtatgtcatggaaatggagcagttcgggcacgcggcgaccgttttgcagtccttgcacacggcatacgtgtggtagccgcggcggttgagcagcaaaatggactgcctgcccgcgcggatattttcggagaccgcacgcgccagcgccatgctgatcatcggcttgccgcggtagagatcttcgttgttcatatcgacaagctgcaccgtgggcacaacggcatcgccgtagcggtggtgcagcgcgtggtagcggtacttgccgctttgcgccatgtagtaggactcaacagacggcgtagcggagcataaaaggcagtaagcgcggttataattcacgcgaaacttcgcgatgtcccgtgcgtggtagcgcggcgtgctctccgatttatacgtactctcctgctcctcgtccatgacgatgagcccgagattctgcacaggcgcgaacacggcagaacgcgtgccgacgacaattttcgctctgccggtgcgcacgcgcttccactcatccatgcgctcaccaacggaaagcccgctgtggaaaaccgcaacggtatcaccgaacgccgccgtaaacacggcaagcgtctgcggggtaagagaaatctccggcaccgtgacgatgacacccttgccaaccgtaagcacatggcgaatgacatgcaggaacacggcggttttaccggagcccgtcacgccgtagagcagaccgaccatcggttctgccgcatcgcattcgcgcagaatgtcctttgccacattcatctgctctgccgaaagcgtctgcggcagcctgatgtctgccatttcctgctttgggcgtcggaagcgctcaacttcaaaaatctccgctgcgcccttatcggcaagcgtgcggatgatacccgcactcacgccggtatagtagctcagctcgcgcacggttacggtgccgatggcgcacagcgtatcgaacgcgctttgctgcttcggagtcagcttgccggaaaaatccggcacggcacagaccatgcgcgtagtggcatccgccgcattgcgggacgccgcgttttcgcgtatgaccgtgccgttttcgagcagcgaaagcagatctctgcttttttcttctatgccgagcctttcggtgagttctgcgccggtaagtccgttttttgccgccgtcagcgccacgataatctgccacgcggtatccgtgaacgcttcgcggtcatagtttttgaacgcggcattcatgcgatagcggtttacgagcttatagccgatgccggcgggaatcatgacctttacggcatcgtacagtgtgcagaagcagcggcttttcatccatgggatgagcgccagcatttcgtcatccaaaagcggctctttgtccaaaacagacgcaatagctttcagcttttgccctgcgccgctttcatacgacgtagagagcaccatggcaacgcgcgtgcggttgcctgcgccgaacggcacagtaacgcgtacgcccggacgtaccgccgtttccaacgcctgcggcacgctatacgtaaacggcttatcaaaccgatatgtggtattctccaaggccaactgtgccagcaaagcaaaaactccctttacggtaaattagccgtcaatctcgtccggctcgatgatcttatacttctcatcgacgaagtcctgcacggccaaatcaaccggcttttcaacgatgatttcattgttgtcttccgcttcctgtgtaatttctcttgcgcgctttgcaacggcgataacaacggaataatagctcttgtgcggggttttaatgatgttacaggacggtttaagcatggttcaggatcctttctgctatatctttttcgcgggaaacacgcagcttctccgcggctaaaatggcttctatatcaagcacggcttgttcgaccgtgtcgttgatgacggcgtaatcgtaatcttttacgcagcggatctcgtctgccgcggcagcgaggcgcttctctataacttcttctgtttcggtgcctctgccgcgcagacgcttttcaagcacctttaaggacggcggcaggatgaaaaggctcacgcagtccggcgcgacttttttaatctgtctgccgccctgcacttcaatctcaagcacgacatcgtgcccttcctcaagccacttttcaaccggcgctttcggcgtgccgtagaagttgtcgcaatattctgcatattcgagcatcgcatggttttcgatgttcgttttgaactcgtcttttgtgatgaagtaatagtgcacgccgtgttcctcccccgggcgcggggcgcgcgtggtggcggaaacggacattttaagattctcattgcggcggaacaattcttttaaaatggtccccttgccgccgccggagggcgatgaaacgacaacaagcagtcctctttttttcatcggaaacattcctttcttttccgttatttatacattcggggcttccgcttcaacggggtcttctgctttttcgccggtgttaaagcggtttgcaacggtctccagctgcaaagcggaaagcaccacatggtcactgtccatgatgatgacggtgcgcgtttttctgccgcacgtggcatcgatcaaggcgccgcgttcccttgaatcctgcacgatgcgcttaatcggagcggattccgggctgacaatggcgatcatgcgctctgcggaaatcatgttgccaaagccgatgttcacaagctgcataataaacgctccttactcgatgttctggatctgctcgcggatcttttcaatctcggccttgatatccaccaccatgtaggcgatcttggaatcgctggccttcgagccgatcgtattcgcttcgcggttcatttcctgtacaagaaaatccatttttcgaccggagggctcttcggcgctcaagaacgccttaagctggtcgaaatggctgcgcagacgcacggtttcttccgccacggcgaccttatccgcaaaaatggcggcttcggtcaaaatgcgctgctcgtcgatcgtggtgtcattcagtacctcgcgcagctttgcttccagacgctcgcggtattccgtgacggtctccggggagcgctcttcaatctgcccgacgatgtttaaaatcgtctctgcacgagacatgacgtcctcgtaaaggcgctgtccctccgtctcgcgcatttgaataaacgcgtccaccgctttttcagcaacctgcttcacgtctgcccaaatggcttcctcatcctcaggcgccttgtgcacggaaaaaatatcggggtagcgcgaaagagaattgacggtaacggtgtccggcagatggtagcgctcggaaagctcgcggaacgccgcaatataacccgcggcaagcgagtggttcacactgacgacgacatccgtgtcctccagtgtctcaatgctcaaataaaaatcgatcttgccgcgtgccacacggctctgcacgtaggttttcagcttatcctcaaggaatccgtagccgcgcgtcacacggggagaaaactcaaaatacttatggttgaccgatttcagctccgccgtaatgtgtctgccgttgacggtttcttcgcagcggccgtacccggtcatgcttttcagcataggatcatctcttttctaaaattctgtctatgtttttcgggatattttgtgttcctcacagaggacatagtacccgactttaattctatcaagatattttaccattttaagccggaaaatgcaacctgtcgcgggcgaaaatcggaattttcggaaaaaacaaaacaccgcaggcagcagcccgcggcaattttgagacaataccgcataaagaggtttcgctttgcggcatttttggggtttattcgtaatgcacgatgaggctcatcggcgcttcggcgtgatcttccgcaaccgtaaacccgcgctgcttgaagaaatcaaaaaaatccgggaacgcggtgcgaatgtgattcatgccgttcgtctcgccgaacgacgcggcggagcgcataagtgtatcgagcacaaaagtcgtcatggggtcgggctttgcttttgtgaaatcggtctgcccggagacggaaaagccgtagaacacaagcgtgtcgtcttcaagcgcgacgacgacatagccgagcctttcttcgccatccgtcatcacaagcacacggccgttatcgggtgcgccctctgtttttgccagcagggcggcttcttctgttttttccgccattggtacgatttgcagcattttgtttttcctcctcgcgctgtgtgttctgcgcgtttccttttttctgtgcggcggcgcgtaatctgcgcacttcgtccggggtcagatcacggaagcgcccctgcggcagcatgccgagcttcaccgcgccgatggccgtgcgcttcagtctggccacttcaaggcccactgcttcacacatgttgcggatctggcggttgcggccctcatgcagcacgaattccagcaccacgcggccgggctgctgctccaaaacacgcacggaagccggggcggtcattctgccgtcgatttccacaccgaccgcaaggcgcgtcagctgttcttccgttacgccggggcgcaccgtaacacggtacaccttcggcacatgtgtagacgggtgcgcgatgagatttgcaaaatcgccgtcgtttgtcatgagcagcaagccctcggagtctttatcgagacggccgatggggaataatctcacaggcagctcctccacaagctcgctgacgcactttctgccgcggtcgtcggacatggaggtcaaatagccgcgcggcttatgcaccattatgtacatcttttcgtccacggtctgcacgcgctgaccgtctacggtaaccttgtctttcttcacgtccaccttgtcgccgatctgcgcgcggacgccgttgaccgcaacgcgccccgccgcgatcatctcctctgccttgcggcgcgaagcgatgccgcactccgcaagcatcttttgcagtcttgtatctttagccatagttcaaaacctttctctgtatctctcaatttataaagcttgtgcttctcaaaaagcgggcaaaccacttttgaaaccacgtgcgttcgtccttttgcaaagcacaatcttcgcttgaaacaagcggtgtttcctttagaaccttgccgttcacgctgtatcgcacgcagccgattacgtcgcctttttctaccggcgcatacacaaatcgcggcagaatgcaccccgccgtgaccgtcacatctttcggcaaaacggcgctttcctgcgtttggagcgtgagacttatgcactctttttcaccgccgacagcgggaagcgaaaccggctgaaaatccgccgtatatgttcgctctgcaagctgtgcaaagccgtaatcgtacaaattcatgtggtcgttccagtcgtccggggcatttaatgtcacacaaatgagccgtgcgccgtcccgctctgcggaagacacaaggcagcgcccggcctttttcgtaaagcccgttttgatgcccgtacagtccgggtacagctttagtaaacgattgtgattttcatatcgcacggttttttcgggcgaaataaacggcacggaaagcgtcgtctgccccaccgcggcggcaaactcttcattttgcatcgcttccgcggcaagcagcgccatgtcatacgccgtggagccgtgcccctcggcatcgagccccgagggcgtgacgaaatgcgtctgcatcatatgaagctctgcggcacgcgcgttcatcttctcggaaaatgcttccgccgaatcggacagatacagcgctatcgcattcgcaccatcgttgccggaggccatcatcatgccgcgggcgatgtcgccgagtgcaagcacctccccggcgcgcagccccatagaggagccctccacgcttatcatttccggcgtgattgtcacgggatcacccctatgctcactttcaaatgccaacagcgccgtcatgatcttcgtcgtgctcgcaacgggcagtacctcgcggctgttcttttcaaataagaccgtgccgctcacgggctcatacagtacggcggcatacgccgaaacgcttacggactccgccgtctctgccgaaaccggcagactgccccacacaaaaacgaccgccagcaaaacacaaagtatctttcgcaaaaatcaccacctgccacggcatgtatacgcggcaggcggctggattatacaatcaatactgcgggggcagggaaatatcctcgtcctctttgtctttcttatccttgttgaaaagtccggcgatcttgtccactacatccggcacactcgccacaacacgatcgacagacgaaacatacggctcaatctgcaaaatgcgcacattgccgttcgagattaccaaaaacgcaataggctgaatggtaatgcccgcgccgctgccaccggcaaagaggcccttctccggctgcgctttagaaggcaggtcggagccgccgcctgcaaagccgtagctcacacgcgaaaccgggatgaccgtggtgccgtccggcgcggtgatgggatcgccgataacggtgttcacgtccaccatttccttgattttatccatggaaacgccgagcaggttgttgaccttattttcactcatgttgttctctcctttttatttgctgccggcgctgcggattttacggcaggctttccggcactttgaaatttattgtaaaacggcaatatcgtgcgcagtataaactgcacaccgtgatgcacgacgaacagcggacgcaccgcgccgcttgccgtacataaaaccttcggttcctttacgctgtaatcgagatcgacggaaacacatccatgcggcgacttgcagtttgttaagccgagcaagaccgacacagccgggtacacgcccgcacacacctctccgtacaggatagcaatttcggcggcatctttcccgccgccgacgagcacgtataggtcgaaatctttcagctttatgtgctttaaaagctttccgaagcgcgtaccggtggcctttaacaaatctttcgcgagcgttaaaagtcccgtaagtccctcggcttccttatattttttcacctgccgcaaaagcgggttcggctttttctccttggctttttcttcagactctttttcgctcggtttcttctcttttttcgactccggttttttctccggtgcgggaagcacgcggtattttaaaaagagataccgtataaaaacggtcgtctctccgttatagttcagatcgaaccgcacagggatgcacagcagaagaaagatcagcgcgatgagcccgagcagaatccataaaacgatcatgctttgtctgccccgtcgttttgaggtgcgttttcggtttcttcctcctgcggcaaaggcggcagctccaaaagcgagcggatgcccatgcagcgcaggaaattttccgtcgtgccgtataatagcggcttaccgggaaggtcaagtcgcccgcgctcttcaatgagcgctttctgcaccagactgccgatgacgcccgagcaatccacgccgcgcacctgctccacaaacgcttttgtgacaggctgattatatgcgatgaccgccagcacctccatggccgcctgcgagagcggcgcgctgcttctgaggtctaacgctgtgcgcaccggtgccaaaaacacgggattcacggcaaactgcaatgtgtggtctaattgcagcaaatggatgccgctttcttccttgttatatttcgcctgaagcgttcggctgagctccagaacgttctcttcctcggtattaagcgcctgcgccagcttatcgatgtcgatcgggtcgccgcacgcgaataagattgcctccatcatgccgagcattttctttttattcagcttactcgcctccgttcgtcagtttgatctcgcagtcttcgccgtcaccgtccacgcgcaatcgcttgtccttgacaagctccaaaacggcgaggaacgccgccacgcgctccgaagggtcgtttttgccgcggaacaactcttttaacgacacatgccgctttttccacaggctgcgcagcacgaaaacaatttgcgaagccacggagaccacacggcgcgtgatgagctttgagatggtgtcctccggcttctgcggctccggcggcttcttttttccgagcatcgacaaatacgccgaaagcagctcctgcggcttatgatggcgcttataggtgagatctgcgggaatatccgcctgcgcacgcacgatgctgtcgagcgaaaaccgctcgcgcagacgcatggccgcttccttgcactgctggtattcaagcagctgaccggtcagctcttgcttcaatgccgcttcctcttcctttttcggcagcagcgaaacacttttgatgtgcacaagacgcgccgccatctcaagaaattcgctcgcaacgtccatatctgccgcctgcatctcgtgaatctgcgccatgtactgctctaaaagctctgcgatgggaatatcgtagatattgagtttgttttttgcgatgaggttgagcagcaggtcgagcggaccctcaaacacatcgagcttataggaaagtgtttccgttttttccatgttcatacacgatcacaatacgccggccagacggaacggcaacgccgcaagccagctcacaccgccgtatacggcgttttcaagcacatttagcggacccgtgagcgcaccggaaacaatgagcagcatgccgatcatggagagcatgttctggtactggtagaacttgtagcgtgcgcggtcgctgagcagcgccgccagaattttggagccgtcaagcggcggcagcggcacaaggttgaagaccgccagcaccgcgttgataaacgaaaaatagctgaagaacagtaaaatgtaatgcacaaacgcgttgtacggcgcaaaagccgcaatagcataataaataacgcagccgacataagatgcaagcaggttcgccgccgggcccgcaagagacgtgagtgccacgccggagcgcggatttttaaaataccggctgtcgatcggcacgggctttgcccaaccgatgccgaaaagcaaaaggaacatcgcacccatcgggtcaatgcttgcaagcgggttcagcgtcaagcggccctcatactttgcggtagggtcaccgagtttgtacgccacccaaccgtgcgcaagctcgtgcagcggcagcgcaaggaaaacgatgacgagcgtggctaaaatctgaatgataacactgagcggatcaacagcgccgccgcgcagcaaggtcatgatcgaattaaaaagcaaatataacacctctttctgtggggtgcacccgaaaacggtttcggatataccttatagaattataaagcatagaggacgaaaaaacaattcttttccgtaaaaacattctgtgaacaacttttcgttttagcaaaagatgcgaaaagcgagttttttcaaaatttagttcccatttttaaaaataaatcttgcattttgcgttcgtttctgctacaatactaacgttgcaatgaagaattaggcactttaaggaggtgcagatagatggctaaatgtgaaatttgtggaaaggacgtatccttcggcatcaaggtttcccactcccacagacgttccaacagaacttggaaaccgaatatcagacgagtaaaggcacttgttaacggtacaccgaagcgtgtatacgcctgcacccgctgcttgcgttccggcaaggttacaagagcagtataaaaaaactggtcgataaaattatggacatcgtttcggtgtccatttttttattttccgtatttactttttcatcccgctgtgataagtttcgtttgtgttattccatcctccatcgtttagaatgacttccttaataagcaaaaggcgccgtgcaggttttaaaccacacagcgccttttaagctttattctgttttaaatcaaatcaggatcagacaatgccctgtgcgagcatagcatctgcgaccttcacgaagcccgcgatgtttgcgcccatgacataattcttcgggtggccgtacttctcggcagccgcgtctacgtttgcaaagatgttctccatgatgcccttcagctttgcgtcaacttcttcaaagctccaggagaggcgctcgctgttctggctcatctcaagagcagaagtcgcaacgccgcctgcgtttgcagccttgcccggtgcaaacagaataccggcctgctggaagacattcgtagcctcaatggtggacggcatgttcgcaccctcggcaacgacctgtacgccgttcttgacaagcgtcttcgcgtcttcttcgttcagctcgttctgcgttgcgcacggcagagccacatcgcacggaaccgtccaaacgcccttaccctcgtggtattcgctgttcggtctgtacttcttgtactcggtgagacgtgcgcgcttaacttccttgatctccttgacagctgcgaggtcgatgccctccgcgtcgtagatccagccggtggaatcagacatggtaacaaccttagcgccaagctgctgtgccttttcggttgcataaattgcaacgttgccggcgccggagataacaaccgtcttgcccttaatatccatgccgttcttcttcatcatcgcatcggtgaagtacagcaggccgtagcccgtcgcttccgtacgggcgagggagccgccgtaggtaagacccttgccggtgagaacgccctcatagcagttacggattctcttatactggccgtagaggtagccgatttctctgccgcctacgccgatatcgcccgccggtacatccgtatcagcgccgatgtgtctgtaaagctcggtcatgaagctctggcagaacaccataatctcatggtcactcttgcccttcgggtcgaaatcggagccgcccttgccgccgccgatgggcaggccggtcagggagttcttgagaatctgctcgaagccgaggaacttgatgatgccaaggttaacggacgggtgcagacgcagaccgcccttatacggaccgatcgcagagttgaactgtacgcggtagccgcggttcacatgaaccttgccgttatcgtcaacccacggcacgcggaacatgatctggcgctccggctcggtgagacgctccaagataccggcagcctcatactgcgggtttgcttcaatgaccggctccaaagtggtgagaacttccgttgcagcctgaatgaattccggctcattggaattaagctttttaaggtgttccagctgttcgcttacataagacataacgatcgctccttagaaaatagattgaaaaataagaaaagcacaggaaacgcagtttttacctttaaatcctgcaaaaagatctcccttcggtcttttgggcctttttgcccgtttcctgaaaacgtttacattttaccacaggtttttcgtgttttcaatatgtttttgcgaaaaatttcaaaaaagtttcagcaccgcaaagcgatgaattttgaaggaaacctgtttcaattctgcaagttcactttcttttgttgtaaaagcaccagtattctttcgtctcataccctgaaattgtacgaattcttgcacggcggttttcggaaaaagattgacattcggtgcacttttctatagaattaaagtgtatgataatgcacgggagaaaattttgccgttttcggcttttcgcccgcgccaaacgctcaatgaagaaaggtatggtaatgtattatgcagaagaccgaattactctatgagggcaaagcaaagaaagtttacgcaacggagaacccggattattgcatcgtttcctataaagatgacgcgaccgcgttcaacggcctcaagaagggcaccatcgtcggcaaaggcgttgtcaacaaccgtatgtccaacttcatgttccagctgcttgaaaagcacggcatcaagacccactttgtagaagagctttccgaccgcgacaccgtcgtgcgcaaggtcagcatcgttccgctcgaagtcatcgtccgcaacaaggcagccggcagtctctctaagcgcctcggccttgaggaaggcacccccatgcgcgtgccggttctggagttctgctacaagaacgacgatctcggcgacccgatggtcaacaattaccatatcctcgctgccggatttgcaacgcaggaggagattgataagatcagctcgatggctctgaaggtcaatgagctcatgctggagttcttcaagagcatcggcgttgacctcatcgacttcaagatcgaattcggcaagacctccgacggcgagattatcctcgcagacgagatttccccggatacctgccgcttctgggacatcaacacccatgaaaagctcgataaggaccgtttccgccgcgacatgggcggtgtggaagaggcttatgccgaaatgatgaagcgcatcggcctgaactgactgtaaagcatatgacgaaacggagtccccgaaaacgcggaggctccgtttacgcggtttattgccgcattctccgtttgttatttatttgattaaaggaaaagataaacatgagagatacgtatgaatcccccctgtcctcccgctatgccgacaaagagatgaagtacctgttttcgccggacatgaagttcaagacctggcgccgcctttggatcgcgcttgcagagagcgaaatggagctcggtctgccggtcacgcaggaacaggtcgatgagctgaaggcacacgccgaggacatcaactatgaagtcgccgaagagcgcgagcgccttgtgcgccacgacgtgatgagccatgtgtatgcctacggccagcagtgcccgaaggctgccggcatcatccacctcggcgcaacaagctgctatgtcggcgacaacaccgacatcatcatcatgacggaagccatgaagattgttaggaagaagctcgtcaatgtcatccgcattctttcccattttgcggaagaatataaagacctgcccacgctcgccttcacccacttccagccggcacagccgaccaccgtgggcaagcgcgccacgctgtggatgcaggagtttctgatggaccttgaagacgtggagtatcagctcagcaaagcgaagctgctcggctccaagggcaccacgggcacacaggcaagcttccttgagcttttcgacggcaacgatgaaatggccgcaaagatcgacgcgaaaatcgccgagaaaatgggatatgagagctgctttgccgtctccggacagacctacccgcgtaaacttgacagccagatgctgaacgttttgagctgcatcgcgcagagcgccgcaaaattctcgaacgacatccgtcttctgcagcacctgaaggaagtggaagagccgtttgagaagaaccagatcggttcctccgccatggcgtataagcgcaacccgatgcgcagcgagcgtatcgcctcccttgcacgctacattgtcgtagacgcgctgaacccggcgattaccgcttctacgcagtggtttgagcgcacgctggacgactccgcgaacaagcgcatcagcgtgccggaagctttccttgcgaccgacgcgatcctgaaccttgtaatgaacgttgcggacggccttgtggtttacccgaaggtcatcgagcagcacctccgccgcgagctgccgttcatggcgacggaaaacatcatgatggacgccgcaaagcgcggcgcagaccgtcaggagctgcacgagcacgtgcgcgtgcactccatggcagcctctaaggtcattaaggaagagggcggtgaaaacgaccttctggagcgcatcgcaaacgacccgatcttcggcgtcacactcgacgagctcaagggcatcgtagacccgcacaaatatgtcggccgcgcaccgcgccagaccgaaattttccttcacgatgtcgtaaagccgatcctcgatcgctatgcagacaccgaaacagaaaccgcagagatcaatctgtaattcaccccgccgttttaaacggctttgggaggaaataaatatatataatatattagaaaggcttgaactattatggtaaaagcaattgtcggcgcctgctggggcgacgaaggaaaaggcaaaatcaccgatattctggcggaagattccgatatcgttgttcgtttccagggcggcagcaacgccggccacacgatcatcacccattacggtcgctttgctctgcatcagctgccctccggtatttttagaaagaacatcctcaatatcattggcaacggcgttgcgctctccgttgaaaacttcatcgacgagctcaaggctgtaacggaacagggcgttccgatgccgaacatcctcatctccaaccgctgccagatcgttatgccgtaccacaaagcactggacggcatggaagaagcccgtctggcttctaagtcctttggttccaccaagagcggcatcgcaccgttctattccgataagtacgcaaagatcggctttcaggtcagcgagctgttcggcagcaaagaggacctgatggagaagattgaccatgtgctcgacctcaagaatgtactctacaccgacctttataaggtagagccgctcgaccgcgaagagatttacgcaaagctcatggagtacaaggaactcatcgcgccgtatgtggccgatacattcaccattctccacaacgccgttaaggaaggcaaaaccattctgctcgaaggtcagctcggctccctgaaggacccggacctcggcatttatccgatggtcacctcctcctccccggtcgccggcttcggcgctgtcggtgcaggcggcatcccgccgtatgagatcaaagagatttacacggtcgttaaggcgtactccagcgctgtcggcgcaggcgagttcgtttccgagattttcggcgatgaagcggaagagctgagaaagcgcggcggcgataagggcgagtacggtgccaccaccggccgtccgcgtcgtgtcggctggctcgacctcgttgcagcccgctatggatgccaggtgcagggtgcaaccggcgttgccatgaccgtgcttgatgcactcggctatctcgatgagattccggtctgcgtcggctacgagctcgacggcaagcagattgattacttcccgaccactacggagctcaagcgctgcaagccgattctcgagaagcttccgggttggaaatgcgacatccgcggcatcaagaagttcgaggatctcccggagaacgcacgtcattacgtcgagtttgccgaaaagcacctcggtgttccggtctgcatggtctcgaacggccccgcccgcgaagacatcatgtatcgctaacttaagatattctaagaaagcaggcagccccaagccgcctgctttcccctactttgcatacaaatcattaaatacagttatattttcactgtacagagaataaccaattttgaattgtaaattctgaaaggatggtttaggatatgtgcggaatcgtcggttatatcggtaacgatcaggcagtacccgttctcttacaggggttggaaaagttggaataccgcggatatgactccgcaggtgtagcggtcttctcggaagacggattgaaagttgtaaaatcgaaaggccggctgcgcgtactgagcgacctgttggacggcggcaaagcactgaccggtacgctcggcatcggccacacgcgctgggcgacgcacggcgcaccgagcgatgtaaactcgcacccgcaggtgagcgagggcggtcgttttgccgttgtgcataacggcatcatcgagaattacctctacctcaagcagcacctcatgcgccgcggcgtacagttcgtatcggaaaccgatacggaggttgtcgcgcagatgctcgaatactacgataagggcgacattctggagacgattgaaaaggtcatctccaaggtggagggcagctatgcgctcggcatcatcagtgccgaccacccggactgtatctacgcagtacgcaaggacagcccgctcatcatcggcatcgggcagggcgaaaatttcatcgcgtccgacattcccgcgatcttatcaaagacgcgcgagatctgccgcttaaaggataacgaaattgcagaactcacccgcgacggcgtgaagttctataacgcagacggcgagccggtcgaaaaagagatcgagcacatcgagtgggatattgaagcggccgaaaagggcggctttgagcatttcatgatgaaggagatcttcgagcagccgaaagccgtgcgtgataccattacaccgcgtatccgcaacgggcacatcgtgcttgatgacatcaccttgaccgccgaggagctgcgccgcttcacaaaaatcaacatcgtggcgtgtggcacggcgtaccacgtgggcgtcgtggcaaagtacgcgtttgaagagctgctgcgcatcccggtcgaagtggatgttgcatctgagttccgttaccgcgacccgatcctcaacgaaaacacgctcatgatcatcatcagccagtccggcgagaccgccgatacgctggcggcgctgcgcgaagcgaagcgtgcgggctgtcgtgtgctctccgtcgtgaacgttgtcggcagcaccattgcaaccgaatcggacgacgtgctgtatacgtgggcaggcccggaaatttccgtcgcgtccacaaaagcatacagcacgcagcttgcggtcatttatcttctggcgctgtacatcggcgagcagctcggcaaattcacgcaggagcagctcagtgcatacatcgcggcgctcgaaaagctgccggagcagattgacgaaatgctgaagcacaaggagaatattcagttctttgcttccaagtatttcaacgcgagcgacatgtacttcatcggccgcaatgtcgattacgccgcgtctctggaggcttccctcaaactcaaggagatttcctacattcactccgaggcctacgccgcgggcgagctcaagcacggcccgatctccctcatcgaagacggcacgcttgtcatcgcgcttgcgaccgacgcccgcctctttgataaaatgatgtcgaacatcaaggaggtaaaagcacgcggcgctgtcgtgctgggtgttgcgacggaagacaaaaaagagattgccgggcagacggatatggtgttctacattccgaagaccgcatcgttcatgctcccctccctctcagtcatcccaatgcagctgtttgcgtactatgtcgcctccatgaagggctgcgatattgataagccgcgcaatcttgcaaaatctgtcacagtggagtaaaatagaattgtattcaatcgttgaaccaacgttttaaattcaggaaggcagggtgtaatatgccacaaaacgaaaaagtgctcgtagtggacttcggcggacagtataaccagctggtcgcacgccgcgtccgcgagtgcaatgtatactgcgagatcgtgtcctaccgcgtgggtcttgacgccattcgcgcacagaaccccaagggcatcatcttcaccggcggcccgaacagcgtttacgtcgacggtgcgccgaccattgatcccgcgattttcgatctcggtatccccgtgctcggactttgctacggcttccagctcatgacgcatctgctcggcggtcatgtctgcaaggcgccggagcgtgaatacggcaaaacgctggttcacgtcgataccaagtccaaggtctttgagaacgtcagcccggagaccatttgctggatgagccacaacgactacgccgagaccgcgcccacaggcttcataatctccgcgtataccgataactgcccggtcgccgccatcgagctgccggaaaagaacctctacggcttccagttccacccggaagtgctccacacgccggaaggcaagacgatgctgcacaacttcgtctacaacgtctgcggctgcaagggcgactgggaaatgggctccttcgtcgagacgagcgtcaaggcgctgcgtgagaagattggcgacggcaaagtgctgtgcgccctttccggcggtgttgattcctccgttgcggcagccatgctctctaaagccgtcggcaagcagctcacctgcgtattcgtcgaccacggcctgctgcgcaagaacgagatggaagaagtctgcgaggtcttcggcccgaacggccaattcgagctcaatttcgtctgcgtcaacgctcgccagcgcttctacgataagctcgccggcgtatctgagccggagaaaaagcgcaagatcatcggcgaagagttcatccgcgtctttgaagaagaagcaaagaagattggcgccgtcgatttcctcgcgcagggcaccatctaccccgacgtcgtggaaagcggcctcggcggcgaaagcaccgtcatcaagtcgcaccacaacgtaggcggtctgccggattacgtcgatttcaaggagatcgtcgagccgctgcgtgacctctttaaggacgagacacgtcaagccggccgtgagctgggtctgccggaatacctcgtcagccgccaaccgttccccggccccggccttgccatccgcatcatcggcgaagtcacgccggataaggtcaagatggtgcaggaagccgacgccatctggcgcgaggagatcgcaaaagccggtctcgataagagcatcagccagtactacgccgcgctgaccaacatgcgcagtgtgggcgttatgggcgatgagcgcacctacgactatgccgtggccctgcgcgccgtgaccaccaccgatttcatgacggccgaagccgccgagattccgtggagcctgctccaaaccgtcaccagccgcatcgtcaacgaggtccagcacgtcaaccgcgttctctacgactgcaccggcaaacccccggcaacgatcgagtttgaataatactcgaaaggccaaaaagccttgaaaatgctggacttttgcgcccaggaattgctccgtggcaacaaaatgacaacattttagattatccaagaataaagagctatctgatttctgttagtgaagtcagatagctctttttgtctgttttcttaacttttacccttcaaccttacagtttcccgcataggtgaacgcaatgtaggacttaccgcgattgagctgcaactcgttgccgttcgcgtcaaagaacttcagcgggtcatacataccggccttagaccaagtaatcggcaccattttgccctcggaaatataatagccctttgcattttcgccgccttcccagttgataagcttgtggccatcaacatcgttcggacgcagggaaatgtccgcttccaaaacgataacattctcaaattgcagctgctcgtttgttttgcagtccatgtgcggcttgttctggtagtttttcatgtacacatgcctgtctgcatcatagctgaatgtactgtaattcgcgccaaagtcaacacggatattttttgcatcctctccgctcggagcagcatttttgtccatctcaacgaacttaaacgctgtgcccatcttatcttccttcaaatcggtacgaacattgctatcttccagcatttccggcacctttgtaccgtagaacataccggtatgctcccaggcgtagcccgcattgatacgatccttatcacggccaaaatacttgcctgtaccgtaatagtctgcatcgaaatgatcaatctccatgctattgattgtctccgtcgcaatggtcgggtcaattccccaatgcacgtaaaccgcatcaaacccgaccgccaaaattggataatagtatcggcagctgcgcaccgaacacacgtccggcacctgcgtgtagtcgccgtacaccgccatcaaacgggtcaggtcgtattccaccggtaactcaaaaataagatctgcggcggagatgccatattgcggcagagcggcgtctacgttattcaccattacggcgacagggcgtttaccgatggcgccgtccgtcaaggtcggcaggccggtgagcaggttcacattcgccggttccgtggaaagtgcttccgtgggttccgcggtgctctctgctgcggaagattccgcctttgccgtcggagcagccgtggcagtcgcttccggctcgcttgcggcgctctcctccgtcggttttgatccgcagcccgcgaacacagtcaggctgagcagcaaggcgctgcacaacgcaaatattctctttttcaattttatcaacctccatttgttgatttctgctatttattatagtccgaaacgcaccgaattgcaacaaaaaatgcacgaaaattgtcgggcagcgccaaaatgccgataccaagctgcacaacgagcgcaaagttgaaaatgtaaagagcttatgcagcaaaatatcccccgctctgttcagaacggaggatactttaaactttcatgtgtttagtcttcaaacatgcctttgatcttgccgaagaagcttttccgcttctggtagttcttttcgtcggcattctgttcaaattcctgcaaaagctctttttggcgcttgcttaggtttttcggcacttcaacggttacgcgcacgtactggtcaccgcgtcctctgccgttgatgttctgaatacccttgcccttgagcttgaacacgtcacccggctgcgtgccctcatgcacggtgtagctcaccttaccatcgagcgtcggcaccgtgacttccgcgccgagtgcagcctgcgtgaacgtgattggcatatcgcaccaaacgtcgttgccgcggcgcgtgaaaatggcatgcggacgaactgtaatgtatacgtgcaggtcgccgttcggaccgccgttggagccggcattgcccttgccgccgacattcagaatctgatcgtcatcgatacccgccggaacggaaatctcgatcgtcttctggcggcggatcttgcccttgccgtcgcacgttttgcacggggtatcgacaatctggcctctgccgtggcagcggtcgcacgtgcttgtggactgcaccacgccgaacggtgtgcgctggttgatgcgcacctggccggagccgccgcagttcgggcaggtcttggggcttgtgcccttggccgcgccggagccgttgcaatccgggcaattttcgatctggtggtaggtcacatttttcttgcagccctttgccgcttcctcaaacgaaagggtgacgcttgcctctacgtcactgccgcggcgcggtgcgttcgggttcgcacggcgtccgccgcccccgaaaccgccgccgaagaagctgtcgaaaatatcggtgaaatcaaaaccgcctgcgccgccggcatacggatttccgccgcccgcgccgccgccgaaattcgggtctacgcccgcaaagccgaactggtcatagcgcgccttcttgtctttatcagaaagcacctcatacgcttcgttgacttccttaaacttcgcttccgcatttttatctccgggattcaagtccgggtggtattgctttgcaagcttgcggtacgcctttttaatcacatcgtctgttgcgctcttatcgaccccaagcacttcataataatctcttttgttgtccgccatccgctgtcatctcctcgcaaactccaaaaggcaagggacgcctttcggctccccttgcgcttttgaacgtgtcatttataaaacttaatcgacgtccttgtagtctgcgtcgtaaacgtcaccgttcgggttctggccgccctgctgcgggtttgcgcccggggctgcctgctcgccctgctgcggtgcacttgccttatacagcttctcactaaccgcgtaaatcgccttctgcagctcatccatgccggacttgatctcctcgaccgtgccgttctgcatggtggtcttcagagctgcaaccttgttgttcacttcggtcttgtccgcctcttccagcttgtcgccgctctcgtttacgagcttctccgcctggtagcagaggttctctgcgttgttcttcgtctcaacctcttcacggcgcttcttgtcttcctctgcaaactgctcagccgccttaacagccttatcgatgtcttccttgctcatgttggaggaagaagaaatcgtgatgtgctgttccttaccggtaccgagatccttagcggaaacatttacgatgccgtttgcgtcgatgtcaaatgtaacttcaatctgggggatgccgcgcggagccggagcgatgccgtcgagcttaaagagacccagctgcttgttatcgcgtgcaaattcacgctcgccctgcagaacgttgacctcaacctgcgtctgaccatcagccgccgtggagaaaatctggctcttcttggtcgggatagtggtgtttctgtcgatgatcttcgtcatcacgccgcccatggtctcaacaccgagagaaagcggagtaacgtcaagcaacagcaagccctgaacttcgccgccgagaacgcctgcctgaagtgcggcgccgattgcaacgcattcgtccgggttgatgcccttgaacggctctttgccgataagcttcttaaccgcttcctgaacagccggaattctggaggaaccgccgaccatgagaaccttgttgatctcaccgatagagaggccggagtcgctcagtgcctgacgaaccgggcccatggtcttctcaacgaggtctgcggtgagctcattgaactttgctctggagagcgtgaggtcaaggtgcttcgggccggtcgcatccgccgtgatgaacggcaggttgatggaagcactcgtcatgccggaaagctcgatttttgccttctctgccgcttccttaatacgctgcatagccatcttatcgccggaaaggtcgatgccgtcggaaaccttgaagctgttgatgatccaatccatgacgcgcttatcaaagtcgtcgccgccaaggcggttattgccggccgtagccagaacctcctgcacgccgtcgcccatctcaatgatggaaacatcgaacgtaccgccgccgaggtcataaaccatgatcttctggtcgtcttccttatcgataccgtaggacagtgctgctgccgtcggctcgttgatgatacgctttacatcgaggcccgcgatcttgcccgcgtccttcgtcgcctgacgctgtgcgtccgtgaagtacgccgggacggtgataactgcgctcgtaacgctctcgccgaggtaagcttccgcgtcgcccttcagcttctggaggatcattgcggagatttcctgcggggtgtagctcttaccgtcgatcgtcaccttgtggtctgtgcccatctctctcttaatagaggagatcgtgcggtccgggttcgtaatcgcctgacgctttgcgacctgaccgaccatgcgctcgcctgtcttggagaatgccacgacagacggggtggttcttgcgccttctgcgtttgcgataacgaccggctcgccgccttcaataaccgctacgcaagagtttgttgtaccaaggtcaataccaattgtctttgccatatcaattaccttcctttaactcaaatgagtgtgtgtattctgaattactatataaatggatatttgctgatttagtttgctacctgtaccatggcgtgtcttacaaccttatcgcccagcatgtagcccttctgaaacaccgccgaaatgacgttttcgccaagctcgtcgctttcaatgtgcgccaccgcgttgtgcagcgccgggtcaaacggctcgccgacctgaccgacttctcggatgccaagcttttcaaagctcgccttaaattggcttgcaatcatctcaacgccttttttcatatcctctgcggaggcattttcctgtgccagtgcacggtcgatattatcggccaccggcaaaatcgcgttgattgtatcggaaacggcgttattgtaaacagcgttcttttcgtttgcggaacgcttgcggaagttatcgtactcggcaagcacgcgcaggtgctgctgcttgtggctgtcgaactccgcctgcaagcggtcgtaatcctctttcggaatcttctcgctcttctttttctttttctccttttccgcagcctttgcagattcctctgccggctcggtattcgcttcctgctcgggttcctgaacaggcttcttttcctctgccatctggcaacgctcctttctctattcttcccgcatgatgcgcgtaagcatttcgcctacacgatctgcgacgtatgctgtttgtgccgcgacgtgtgcgtactgcatccgcatcgggccgatcacggcaaccgcgccggcatctctgccgttcacgctgtaccgtgcgcaaatgaccgacgattccgccaaggcgttctgcccggtctctgtgccgatcttaatctgcgtgcggttctgcttgcctgcgagaagttctgtcaaaagctcccgtctttccagaacatccatcacccggcgtgcaccgccaagcttgtattccgggtagaacagcaggttcatctgaccgcttacggaaatttccgtctgcatcgtttcaagcgccacttccaaaagcgccgccagcgccggcgacatcaaaattgccatatcacccagcgagatcgcaaggttttgcacaaatgcccggttgatctccgccacgtcgcgccctgtcacgcgctcgttgagcacgcggaagaaaatgcgcataatctcgtttgaaagatcaaagtcgcagtgaaacaccttgtttttcatggtacccgcgctgctcatcataatgagcattgcggtgcggcggctcgtctgcacgaactgcaccgccttgatctttgcatccgcgccgctcggcgtggtgctcaacgcaaggtaccgtgtagaagccgccagcgttttcgccgcgccacgcaataatcgttccgggtcaaacgcgctctttgcaagcatcgcgtctatcgtaagcttttcggcttccgttaacgtttccggctgcatcagcgcatctacgaactcgcggtagccctcctgtgaaggcacacgccccgcggaggtgtgcggctgttccaaaagccccagctccgtaagctctgccatctcgttgcgcaccgttgcggaagaaacacctgctttttccgcaatggacttggagcccaccggctcgcccgtgcgaatgtatccgtctacgatcgaggcaagtatattttgtttgcgttttgtcagttccatacttgcacctctcaggttttagcactctatgttcccgagtgctaacccttgtctatactatactgcaaaggtcaggaaatgtcaacaccaaaatttgtaaatactttgtgaatgtgcgaattcttcccggtcggcatccgttttgaagcttcttttagcatttccggctccacagtgccaaattcctgtttatatgtaaagataccgaaaaaagtgtcttcgccataacttcactttttgtaataggattttaggattttttgtgcaaattattgacattttatgaaaattatattaaactgatagcccgtgtttcagtttctgtgttcgcattagcccgaaagtccgtaccgttaacggaaaagaggagtaaactatgattcaggcagagcatttacaaaagaccttccgcgtgcgaaaacgaaacgcaggctttaaaaacgccgcaaaagcatttttcagccgcgagtacgaagaaattcatgccctaaacgatgtttcgttccgcattgaagacggcgaggccgtgggctatattggcccgaacggtgccggaaaaagcagcaccatcaaaattctctccggcattttaacaccggacagcggcacctgcgtcatcgacgggcgcgtgccgtggaaagaccgccgcgcgcatgtttcgcagatcggcgttgtgttcggacagcgcagtcaattatggtgggatgtgcccgtcatcgattcattcgagcttatccgcgacatttacgccgtgaccgaagatgtttacaagcgaaatttacgggatttgaccgaccttctgaatttatcggagatcttaaagaccccggcgcgcagcctgtcgctcgggcagcgtatgcggtgcgagatcgccgcctccctgctgcacgacccgcgcatcttgtttttggatgaacccaccatcgggctcgacgcggtatcgaagatcgccgttcgcgaattcgtgcttgatatgaacaagcgccgcggcaccacggtcattttaacgacgcacgacatgcaggacgtggaagccttggcgcagcgtgtcctgctcatcggcaaagggcgcattttattagacggcacactcgacgatatccggcgcggcggcagcgggcagattgacgaaacgctcgcggcgctctacaaacagtttgatatttgaggtgcgccgtgaaacttaaaaaatacatttcgtttttccgcctgcgctgtgtgacgggcttgcagtaccgcgcagcggcattggcaggcatctccacgcaatttgcgtggggctttttgatcatcttcgcctaccacgcgttttaccgcagtgaccccaccgcttttccgatgaccttgcaggcgaccgtcaactacacatggatacagcaggcgtttttagctatgttcgcctcgtgggtcttggacggcgacattttggaggaaatcacctccggcagcatctcgtattcgctgtgccgccccgtcgacctctacgccatgtggtacacgaaatctctctccggtcgtatttccaaggttgcattgcgcgccgtgccaatcttagtcgttgcggcgcttctgcccgcaggctataacttgaccgcgccgacagatttacccacattctttctatttttgctcaccatggtgctgggcgcattgaacagcacggcgttcacgctgctcatctacgtcctcaccatgtataccctttcttccaccgggttgcgctccctgctgctcacactggcagattttctctgcggcggcgtagtgccgctgccgttcttcccgcccgcactgcgcagaatctgcgagctgacccccttcgctgccacaagcaacgtgccgtaccgcgtgtacagcggcgatattgccggcacgaacgccgctttcgccgtaggcttacaaatcttctggctgctcgtcctggtgctcggcggtcacaccctcatgaaaaatgcgctgaagcgggtagtgattcagggaggataagcggaacgacaagtcgttccgctgcccggcaaatcgttcgtgttttgcagtatacaaagaaaggggtcatctatgaaactatactttgaatttctgtctatccatatcaagaaagccatgcagtacaaggcttcgttcttgctttccgcactggcgcagctatttataccgctcacatgcttttggggcgtgcagttcatgttcatgcggtttaagcaggtggacggcttcacgtacaccgaggtttcgctctgctacgccatcgtgctgttgtcattctcgctcgcggagctgttcttccgtgggtttgatacgtttgaccgcatgatcgggaacggcgagttcgaccgcgttctggtgcgcccgcgcaatgaggttttcctcgtcctgtgcagccgcatggatttagagcgcttcggcaagggcattatggcgattttcctgctgatctgggcgcttcaaaactgcccaatcgattggtgcgccgcgcgcgttatgacgctcattttcatgattttaggcggcgtcgtgctttttgcaggcgtgtatttgatcttcgccgggctatgctttttcacattagaggggctcgagttcatcaatattttaacagacggtatgcgcgagcacgggcgctacccgctttccatctacggcaaaggcgtactgacgttctgcacctacatcgtgccctacgcgcttgtgcagtattacccgctgatgtacctcatcggccgccacaacgatgcccgtgcaatgcttctgcccgtcatcgcctgcgtgtttattatcccgtgctatctcttctggaaattcggcgtgcgccattaccgctccaccgggtcgtaaagacgcaagctgtcataatcataaagcaatttaaaaggagcaccccatgaaaaaactcatcaccctgcgcggcaacagcggcagcggcaaaacgaccatcgcaagagctttacaggaaaagttcggcaaaaacaccatgctgctgtcccaagatgtcatccgccgcgacatcttaaagacgaacgacggcgcgggcacccgcgcaaacgacgtgctcatcatgctgcttgagtacggccacgcgcacaacgagctcgtcattttagaaggcattttgaacagccgatggtacaccccgcttttcgatgccgcaaaagcgctctacggcgaaaacatctgcgcgtactattttgacctcccgtttgaggagacgctccgccgccatcaaacgaaggacaagcgcacggagttcggcgaagaggaaatgcgcagatggtggaacgaaaaggactacgcccccgcattaaacgagcagaccctcacgcccgacatgatgcaggacgagatcatcgaccgcatctgcgccgatttagagcgcctcgatacataaaccatacatataaattcagaaagagcgaggttctccccgctcttttttgtatattgtgttatattctgcccgaatttctatcgatgcaaaaataattttatagcattttgttcgtatctatgataaaatagacacagtgataatttttgtaaagcttagaggggcacaatggacaaagaggagtacataattttctttccctttacaaaccgacatcacggatttaacagggcggcgctacaatgtaagaccgaaagcacgcacctgattttaaaaagaaagtaaggtcttcacatgaaatcaatttttcacgcactcaaccggctcaaagtcttccgcgggctgacggaacaggaattcgcatgggtgctctacgacgtgggcaactccgcgttcaccatgctctcctgctcgctcatccctatctggttcaagagcctcgccatcggcactgcgccgggacagatcaactcgcatcaggccacggcgtattattccatcgccgtggcggtcgtcaccgttatcgtggcgcttttagggccgatcttcggcgtgctcgccgaccacaaagataagaaaaaggtgctgttcaccaccgcggcagcgctcggcattttcggctgcattttaaacggcttcatcaccggctggctgctgttcctcatcctttttgtgttcacgaagatttgttacagcgcgtcgctgaccatctatgattccatgctgaacgacatcaccagcgaagaacgcatggacgaggtttcgtcctacggctttgcatggggatacatcggctcgtgcatcccgttcctcatcgcgctcatcgcctatgtgcttgggcccgatatggtcggcgtgctgccggatatgctttctaaaggcatcggcttcacggtgactgccgtgtggtggctgctcgtcaccattccgctcattcgcggctttaagcagcgcaactatgtggaaaccgaggggcatgatatccgcaaggcgttcgcggaaatcttccacaccctcaaaaacatcgcaacgcacgataaaaaggtgctgttcttcctcatcgcattcttcctgtacatagacggcgtgggcaccatcatcgataacgccatcaatatcggcacagacctgaacctcaacacggtcggtcaggtcgtcttcctgctcgcaacgcaggtcgttgcgttcggcggctcgctcgtcttcgcaaagctctcgaaaaaatacaacaccgtcacgctcattctcgtttgtattgcaggctatttcggcatcgcactgtacgcgctcatgctcagcagcctcctgcacttcgcgattctggcgttctttatcggctgctttcagggctccatccagtcgctctcgcgctcgtattactctaagatcatcccggcggaaaactccggcgaatacttcggtatctacgatattttctcaaaaggcgcgtccttcctcggctctgcggtcatcgcggccgtaaagcttgcaggcggcaccatcaacgtggcggtggcatgtctcgcagtgttctttgcgctcggcttcctcttcctgcgcattgcagataagcaaaaagccattcggtaaggaagcagcaggctttacaccgttcgctcttcacgcccgtgaaatatcgctgtaaatcttaataggacatgcaaaaaggaacggtgtacaaaccgttcctttttcctttactcttcataaaccggctcaaaatcatccgttccgtgcccgcacaacggacacgcgtagtcctccggcagcgcgctgccctcatacacatacccgcaaattttgcaccgccagccgacgatcttccgctctcgctcgaccttctccgacttcggctttagcttattctggtaatccgcataggtcagcggagcgcggtcgctgcacacctcggcttccgtcacctctgcaatgaacagcgtatgcgtgccgaggtcaacactgtgcgtcaccttgccgctgaaccgcgcgcaggtgctccagttcagatacggtacgccactttcgtctgtcggcatcggcaggctgtccagcttatcgacgtcgcgaccgctctgcataccgaagtgcttaatggtctcaaacgagcagctgtcatccaacgcgctcaacgtaaaccgcccgctttccttaataagcgcgcaggtgtaattcgtattcagcacggaaaccgccacgcgcacagggctccccgcgacctgcacgccggtattcacaatgcaggcgttcgccttttcctccgcttttgccgccaacaaaaacacgccgtatgtcaaattataaaacgctttgttattcattttgctcctcctatcaaaataataataattactattttcataataacggatagaaagcaaaaagtcaagcgttaatttcggtgtatgcaaaaaggaacggtgtacaaaccgttccttttttagctttatattctatttctaaaggctggcgaaaacttttagccacgcttcccggcagaacggcgttacttcacgctttccgaatcgctcacatacggtgcggcatgttctctttcgagcctacggaacattctcacaagcacgacaacggcgatggtaccgaggatcagctctgcgacgaactgcgcatacgcaaggccgtacagcgggaacagccaattcagcacaaacaacgcggggatctccagcacgatcttgcgcacaacagcgaatatgaacgatttcatacccataccgcacgactggaacacgcccagcgcgaggaaatcgatgcacaagaatggcagcgcaaagcagaagccacgcaggaacgccgcgccgtacgcgacgatgctctcgttcttcatgaacatggagataatcggctccgccgcaaccacgaacgtcagcatcacggccagaataaagtcaagcgaaattttcgccgtaaatgtaaacgtttttttcatgcgcttgatattgccgctcgcgtagttataactgatcagcggcataatgccctgcgaaaagcccattgcaatctggaacggcaccatgttgacgcgctgcgcgatgcccatggccgccaccgggtcagagccatacgcggacgtaaagttgttgagaatggtcatgccggtcacattcaaaaggttctggatggaagccgggatgcccacgccgcacacgcccttgacaatctgtttcgatgggcggaacatggagggcttgatgcacacgtacgtcttgccgcgcttcacgaacagcagcacgaagaagtagagacacgccacggtgttggaaaggcaggtcgcgcagcccgcgcccgctgcgccgaggttcaggccccacggcagaatgaaaatcgggtccagcacaatgttcagcaggcagccgcacatggtgccgatgctcgcgtgcagcgaagagccctccgcgcgcacaaggtacgccagcacgacgttcaaaatggacggcgcggagccgagcagcacagtccagaacaaataatccgccgttgcctgtatcgtttcggcattcgcgccgagcatcaccaagatcggcgactgcaatacgccgtacagcaaagaaaacagcaggctgcaaatcaaagacgcgtaaaatccgaacgccgagctgcggtacacggtatcgtagtctttacgtccgagtgcgcggctcatcatgctggagctgccgatgccgaacaggttgttgacggcattgaacgccaacagaagcggtgccgccagcgtaacagcggcgttctgcaccgggtcgttcatcataccgacaaagaacgtatcggcaaggctgtaaatgaccatcacaagcgagctgatgaccgacggcaccgaaagcgttacgaccgccttcgggatcggcatcgattcaaacagctccgttttggaattatccatttctccctatcctttccgttcttatcacgcaaggctgtccaaaagcagcttgcagcagccgtaaatgccggcgtcgttgccgagcacggccaagttgaaccgaacgtcggtgttcgggtaaaatacgtatttcaagaagcctttcttcacgccttctacgagcatctcgcccgctttcgagacaccgccgccgatgacgacgacctcgggatctgccaccgtgcacacggcagagatggtgtagccgaacgcatcgtacacattctctaagattgcgtttgccgcgccgtctccgtttttggcggcatcgaacacgtctttcgttgtgagcttctcgacactccgcaaagcgctttcttcctcatgttcggcaaggtattttcgtgccagtctcgcaatgcccgaggccgaaacgtactgctgcacgcagccgcggcggccgcacgcgcacgtctccgtctccgcggggttgatcgtcatgtggccgaactcacccgccgcgccgtttgcgcctgccaccatgtgtccatctgaaatgaccgcgccgccgacacccgtgccgagcgtgatgaataccacgttctcgctgccacggccgccgcctttccaggcttcacccatcgccgcagcattcgcgtcgttcacgaccacaaccggcagtcctacggtctcttccagcgccgtgcgcacatcaaatacgccccagccgaggttcacgcagcggtgcaccacaccgtccgccgtcaccggcccggggatgcccgcgcccacgcccaaaatgccgtctgcgggaatgttgtgcttttctctgcacttttgaatttccgccgcaatatcacgcagcaccgccgtgccgtcgccctcaatcacggtcggaatctcccacttttcaagcaaagcgccgtcttcctcaaataaaccgagcttcaccgtcgtgccgccgatgtcggcgccgatgacatactttttgttttccatttttataactcctctccgcgcgcggtctcccacgcgtttaatacgcatctatataaattccctttcggtctaaaccgtaaattgcttattaatatagtataccatatttcgccgccgattgcaagggaaactatggaaaactccgtctttttgctgtaggtttgtcaaacatattggacagcgaactcattaggcgagagccagcggaggggtctcatgggcaagttgttggcgcggcggttatggacggcaagctgcttggcaaagtcgtcgagtgaatagaacgaatggcaggaatagaagcgtttctgatcctcacggtggctgcgctccaccttgccgttgtggcgcggcgtgtagggccggatcagcttgtgacggatgcccagctcggcggcagttttctcgaacagtgtgggcagatcgcgcttgctgttggagaaacgattggtgaactcgaaaccgttgtccgtctggacacactccacttctatgcctctgcgggcgtaccacgcccgcagcttgcgcaggaagtccgccgaggaataggtggactgctccgggtaggccgccaggaaacgcagccttgtgaactcgtcgatggcggtgtactggaacaggcgcagctccggatctgcgatacagcggcgggggacgaccttgacatctacctgcacgcgctggccgggataggtcatctgctcgtaaggcttcggcttgtacggatttttgggcttttcggccggaaacagccccattttgcgcataacgcggaacaagctctccggacagcgggtgtagccgcgcttccgcagacggtgccacagttcgatcatgcccagcgacggattgcggcggcgcatatcgcggatgagctttagctcggcctccgtgtgctggttggggtggctgtgaggccgtctggactggcaggccagagacgccacactcccgtcccagcgctgcttccagaagtagatgtacgaccggctcttgttgtatttccggctggcgcggctgacgccgtacttttctgcgtacttcattagggattgtctgtaggccatgtcctgtgttatactcttactcatgaggaatatggtctcctttcggaaagtttggtgtggtagcttaactttaacacatgaggccctattcctcataccctttttattcaattgtccaagatgtattgtagtcctacaaactatggaaaactccgtctttttgcagccgccttgcaaacaggggaattttgtggtattctttaacgtataacccaaacggccgcctgccgatgtaccgccattacgcggccgctgtgaccaaatagcccgggaaccccccggcggcgcagcgttcttccgaaaacggacagaggcagacggcaacatagtcaatatagattctttctcgcgtattctgcgcagcgcatgtttgcgtaaaacccaggagcgccggagaacctttcgcgctccgtaaaaagaaaggattgaacaaaaatggagggaacttcttccaaaaaagaaagcaaagtcaaggtgtatctgcaccgctactttatcgatgccatgagcgccatggcacaggggctttttgcttccctgctcatcggcaccatcatttccacgctcggcacacagcttaacattccgctgctcgatgagattggcgggtatgcaaagtccgcagccggtcccgctatggcggtcgccatcggctacgcgctgcaggcgcccccgctcgtactgttctcgctcgtcgcagtcggcggcgcggcaaacgcgctcggcggcgcaggcggtcctctcgcggtgctcgtgctcgccatcatcgcggcagagttcggtaagctcgtcagcaaaaagacgaaggtagacatcatcgtcacgccgctcgtcaccattttttcaggctgcggcctcgcgtacttattcgcgccgtacatcggcacggcggcttccagcgtgggcaaccttatcatgtgggcaaccacccagcagccgttcctcatgggcattctcgtttccgtcatcgtcggcgttgcattgacgctgccgatctccagcgcggccatctgcgcagcgctcggtttaacgggccttgcgggcggcgcggccgttgcaggctgctgtgcgcagatgatcggctttgcggtcatcagcttccgcgataacggctggggcggcttctttgcgcagggcatcggcacttccatgctgcaggtgccgaacatcatcaaaaacccgcgcatctggcttgcgcctacgcttgcttccgctgtgacgggccccatcgcgacatgcattttcggcatgcagatgaacggcgcaccgatctccagcggcatgggtacctgcggccttgtgggtcagatcggcgtttataccggctggctgaacgacattactgccggtgccaaaacagccgtcaccgctatggactggctgggccttgtgctcatctgctttgtgctcccggctgtgctttcttttgtctttgacctcatcttccgcaagatcggctgggtcaaggacggtgacatgaagatcgacgcataaaaatctccgttttccggcaaacgcctaaggctgaaacgctttaggcgtttttcattgtgctaagtgcggtactgcacgacgtttttcttgtacggaattacccttgtttttccgtcctttcgcccgtataatcaaatagaaaagtctattctcgatttgggaggtacaaaatgcagtttcaatatcttggcaccgccgccgcagagggctggcctgccgtattctgccgctgcaaatattgcttagaggcgcagcgcctcggcggcaaaaacatccgcacacgctcgcaggctatcgtcaacgacgatcttctgctcgacctgccgccggatacctacatgcacaagctcatgaatcatctcgatctcagccgtgtgaagtatctgttcgtcacgcactttcacatggatcatttctacccgcaggagctcaccgtgcgcggctccgtttacagccttgagatgatcagccccgagcttgaaatctactgcgcacaggagacctacgattatttccgccgctgtgccgattgggaaattgacgaaaaaagcgacagcgccatgcactggcacatcttaaagccgtttgagaccgtggaagccggtccctaccgcgtagcgccgctgcccgcaaaccacatgaacccctcgcaccagccgttcgtgtaccacattgtcgatacacgcgaggataaatctgtcttctatatgcacgacagcggctactattttccagaggtgtgggattacctcaaggcgcagaaaaagcccgccgatcttttcagcttcgacactacgctcggctatgaagactgcggctttaaaagcacgcacatgggcgcgccggaggtcatccgcctcaaggaggagctcgaagcgctcggtattgttgacaaacacacccactgcgtgatgaaccacttctcgcacaatggtcatcttctgtatgacgagctcgtggagcttgccgcgccgcacgacatcgaaatttcctacgacggcatgaaactgacactttaaactctacttgcatgcaaaaagcggagacgccccggtttttaagggcatctccgcttctttctttatgacaataacaggaacaagtaatataaaaactcactgattgtacttttgtggcaacaactattgtcttttttaaaaatccgttccgtcaatttcgcttctcattatatcaaatttgcatataattatataattctgtatattcaggcgctttccggtcgaattcttgtaaaaaagaaaaacgacagagcaacccctgccgtcttcatagcgcatgttgttttccgtttacttgcagcggcgcacagcttcttcaatcttcgggagaagctcttccttattcgcgtccttcgtgtacttaaagatagcggcaacaatctccggaatatcggaagccttgtagtgctcagtcgtagcaatctgcaaaccggcatattcattgcgggtcagcaaaggcgcgaagcggcgggcattctttctgccggggccgtcattgatgaaagctgcaatgaactggtaaccgatcagattgttgatgataacgtggaaggagttcttcgcaaacagcggattctccgggtcacgcagcgcaatctccatgatctctgcgcggttcaacggacggccggcctcccaaaggagctgcatcatcgcaaattcggaattcgttaaacggatatatggtttttttcttttcatgctatatcctcctgacaattttcatattccatattgtttcaactaatcctgtcgaaagtaatatcagtatatttttatttttgcaatttgtcaagggatttggaataaaaaaactatcgatgaggcagtttttttcaaaaaattcacattttagaaataaaaagaagaccggcagcgcattttacctaccgatcttctgtattttacgcctttttacgcgtcgttttcaataaacagcgtcttaaaatacggcagttcctctgcccatgcgcagaacacgtgccactcgtccagcttgtggtggcggcgcgcaaaatacatgttcgcaatgttctcgtagttcatggtacaggtgcgcatctggttgtagcttgaaggcaaaagctgaatgaggctgtaccaaaggtctttgtccttcgtctccacaaattccacgcgcagcttttccagcacgccaatggtctgcatcaggctctcctttgccgcgggcaccatacggtcacagctgaagtccgcttcttcaaacgtcttcgcctgaattttgtgcatcgtgctcgtggagttcgccacggtgcccaccttatacgtgtcgaattccttccaccagtagatcggcgcggtgaggtcgaccgaaacgaagatctgtcggataaatttgcggtgatccgtacccgccttgcacagacgttttgcaaggctcaggtcgttttcaccgaaaacgaacgtgccgtccggctcggtgtggctgtccatgcggtcccagctgttcatggggttgcgtgcgcctctgatggcgttttcaaagttcatgacgcttgtacgttcgatcttaatcatgtcgttcaacctttcgtattcaaattatttgtggtacttcgtgcccgcgttgatggaaaacgcgcggtacagctgctcgcacagcataacgcgtgccagctggtgcggaaacgtcatcggcgacatggaaatgcgcttcgagccctgcttcacgctgtcatccagcccgtgtgacgaaccgataacgaacgctaagctgctctccccgtttacggccgccgcgtcgatctgctgcgcgagctgcgtggaggagacaagcttgccctcaatgcacagcgtgtaaagcgtgctgcgccccgccgccgccaaaatcgccttcgattcctcgccgagcgcctttgcaatctccgccgcattcggatcctgcggcatgcgcgcttcgttcagttcgatgatctggaaccggcagaatgcggaaagtcgctttgcgtattcctgcacggcgtcacgccaatatttttctttgagcttaccgatgcaaatcagctttacctccagcatattgtctccctatgttaaaatgtgatggcgccgccggtcaggttttcgatcggcgcgacctgcaatatgtagtcctccgcattctccacgcccgccatctgcatgccgcagacggcggtctgccgcgcaatgtccggcgtgttgttctcgcggctcaaatgcgccagcaaaaagtgctttgtgccgtcttcaaaaagctccggcagcaggtcggcgcacgcggtgtttgagagatgcccgaagtccgataaaatgcgccgctttaagctgtacgggtacggccccgtgcgcagcataccgatatcgtggttcgattcgatgaccgcaagatctgtgccgtgcaggttctcttccacctccggcgtgatgtgtccaatgtccgtcgcgaccgtgacggtgtgtccgtcttcggcttctatgcggtagccgaagctctccgcgcagtcatgcggcgtgcggaacgcgtttacgtgcattccggcgagctctaacgtgtcttcaatcgtgtaggcgggatatttgtcgtttaaaattcccatcgattccaaggcccccagcgtgcccttagaggcaaacacgggaatatggtatttggaagcgaacacacgcagaccgctgatgtggtcgctgtgctcgtgcgtaatgaggatgccctgcacggaaagcgggtctataccgcagcgctgcatgacagtcgtcacttgcttgcaactacgtccgatatccaccaaaatgcccgaagattttgaaccgatataataactgtttcccgtgctgccgctgaacagcgggcaaagctctgccatttgcaccctccctgttttcataaaaaacgccctgacaaggttttgtcggggcgaaacggtctgtatacggttttaaccgatctttgcggtatcgctgtttgtgggatcgagcatcaaatacatgtccgcgccaaggccgacgaacttctccacgatgtcctcatagccgcgctgaatgtgctcaatgtcctcaatcttcgtcacgccatgcgcagcaagaccggcaatgatcatcgccgcgcccgcacgcaggtcagtcgcacgcaccggtgcacccttcaggtattccacgccctcaataatggcgctcttgccctctacggtgatctgtgcgcccatgcgcttcaactcttccacatagcggaaacggttttcccacacgctctcatttaaaatactcgtgccctgcgcaatggagagcagcgccgcgatctgcggctgcatgtccgtcgggaagcccgggtgcggcatcgttttcacgttgcacttactcagcgggccgtcgcagcgcacgcgcaccgcgtcgtcatattccacaaccgtcacacccatctccatcagcttcgccgtgatggattccaggtgcttcggcgtcacgtttttcacaagcacatcgccgcgcgttgcagccgcagccgccatgtacgtgccggcttcaatctgatccggaataatcgaatacgtaatgcccttcaaatgctccacgccgcgaatcttgataacgtccgtaccggcgccgctaatgttcgcacccatggagtttaagaagttagcaagatcgaccacgtgcggttcgcgcgcggcattctcaataaccgtaaggccctttgcctttacggctgcaaggataatattcatcgttgcaccgacggtgaccatgtcaaggtaaatgtgcgcaccgcgcagctcctttgcggagacctcgatcatgccgtcgttgaggctgtacgtgcagcccagcgccttaaagcccttaatgtgctggtcaatgggacgcacgccgaaatcgcagccgccgggaagcggcacaatagccttggagcagcggccgagcaaagcgccgatgttgtagtaagagccgcgcattttgcggcccaactcgctcggcaccacgttcgtgtggatggtagtcgggtcaatctccacggtattcttgccgagccagcgcacagtcgcgcccatctcggtcaggatgcgtgcactgagcttcacatcggaaatgttcggtacgttctctatacggcagggagattccgccatggctacggccggaatgatcgccacagccgcgtttttcgcgccgctgatgacaacctcaccgtgcaggcgctttccgcccttgatgataaatttatccactgtaattttcctttctgcgggcgcggcatatcctcggcagtcaaaggcacactgcctgccgccacacagcgccgcaacgcgctgcacgaagtaggatctttcgttatgcccgccggtccgtgaccgactgatttattcctgaaacgggctgccgccgattgggcagctacacagcgcgggtacgaaaaaagcccaatgccgtgcgcaaaaaactaaggcagtctaaaacaaaacatacactgccgcatctatttaaagaaaaagtgatcgcaaaatatagtatgaccagtaaacataataatacacaatggaaaaattgtcaagaagccacaggctatttggaaggtttttccaagattatgtaaacgaaaagtgccaaacccggccgtttgcgcgcctttttctgtataggtactgcgctttacacttattttttcttaaaggagatcgtagattccgtgccgtttcggatgcgcttaatattcgcgcggtgcttgatgataacggtagcgccgatcagtgccgccacaagtgttgccattacaacgtaaagcaccggcagcccgcccacgcagcagtccacaaaatacgtcatacagaacgtcacaacgggatagatcgccgctgccgtaatagacgaaagcgagaccatgcgctttttcaggaacaccagaaggaacaccgcaaagcaaatgaggaacacgcgccagtcgagcaaaagcatcatcgccgccgtggtcacaacgcccttgccgccgcggaagccgaagtacagcgggtacatgtggccgatcatgcagcaaaagcccgccgcatacatgccaaggcgcgccatttcggggtctacgccgtttgcaacgcacgcgtgctttacaagaaaatagccgaccaaaacgctcgcaacacacttgcagaaatcgagcagaaacgtcagcgcagaggcttttttgcccgccacgcgcagcacgttcgttgcacccgcgttgccgctgccgtgcgcgcgcacatcttcgtgcgcaaacgctttggtcagcaaaatggcaaagctgatactgccaagcagataccccacaagcgctgaaagcagcagcggcaaaattaaagaaccgaaattttccatgtagatcaagtccttccccgtcagtctgccttatcgccgcgctcgcgcacgatcatgcgcaccggcgtgccctctaagctgaagatctcgcggatgcggttctccagatagcgctggtacgagaagtggaaaagctctttggaatttacaaagcaaatgaacgtaggcggtctggtagaagcctgcgtcatgtagtagatcttcaggcgcttgcccttatcggtcggcggctgtacgcgtgccgttgcctgtgccagaatgtcgttcaaggtgccggtcgtaatgcgcatcgcgttgctggaagcaaccttgtggatgagttcaaacaagcggtcaagtcgctggccggtctgcgcggagatgaaaatgatcggcgcgtaggacataaaggaaaagtccttttcaagcttcgtcttatattcctgcatggttttgtcgtctttttcaacggcgtcccacttgttgaccgcaatgatgcagcccttgcccgcttcgtgcgcgatgccggcaaccttggagtcctgctccgtaaaaccgaccgtggcatcgatgaggatgacgcacacgtctgccctgtccaccgccatttcggcgcgcaggttgctgtaatgctcaatggaatcctccaccttgctcttgcggcgcaggccggcagtatcgatgaacgtaaatacgccgtacttgttttcgatggtggtatccaccgcgtcgcgcgtcgtacccgcaatgttggaaacgatgcagcggttttcgccggaaacgcggttcacaagggaagatttgccgacgttcggcttgccgatgacggcgaccttgatgatctcgccctcgtcctcctcttccttttcctccggcagatgttcgaggacggcatccaacaggtcgcccgtaccgtgtccgtgcacggaagacacctgaatggggtcgccgaggccgaggttataaaactcataaaaatccgccggcgggtcgcccagcgtatcgcacttattgacgcacacgatgaccggcacattgctgcgctggagcatctgagcgatgttgaggtccgttgcgaccatgccggtgcgcacatcggtcacgaaaatgatgcagtccgcagaatcaatggcaatctgcgcctgcgtgcgcatctgggacaaaataatatccttcgattccggctcgatgccgcccgtatctaccagtgaaaactttctgtttttccattcacactcgccgaaaatgcggtcacgcgtcacgcccggcgtgtcctccacgatggaaaggcgctgcccgatcagcttgttgaacaacgtggatttaccgacgttcggtcggcccacgatggctacaataggtcttgacatacggttttcctccttcttttttccttactccgcagtgcccaaaatgtccttgagctcgcctgcggcgtctttatgcattctgtaagccggcacacccagcttttcgctgagctgctgcacggtcatatcgtctaagaaaatatcttcgtccgccataagcatggacggtgcaagcaaaattgcgtcgccaaggttttcgcggctcaagcggttcacaaggtcacgccccgtgagcagcccggtcacgttgaccgtaccgccaaagaaatcgttgtgcacaggcacaaggttgatctcgagccccgggaatttttcgcgcgcaaagtccatcacatgctccataaacgcatacacgccttcgcccgtcgggatcgtcacgcggcgctttatgtcgcgctccggctcgtcttcaaccgcccaggaaaattcttcttctaagtcgcgcagcatacccacgccgttttcaatctgcgggaagtcctcgtagaattcatacggcggcagctcgcgctttgcaatgaggtagaactcgtcgctcgggaacacggttctcgagccgcgctctgccttgaatttatcgccccaccgctccaaaatctcgatcgccgcgcgcgccgtatccttgttaaacgtctccagcggatacaaccccttgcggtagcgcgtcacgccgaccggcacgcaggcgacgctctgtaagctctcgccgagcgcgtacatttcggaaagcgtaaattccagctcctcgccgtcattcagccccgggcacagcacgatctgacaattcagcttgatgttgtgctccgccagcttgcgcacaaaacgcagcgcgtcgcccgcaaagcggttgtgcatcatcttgcagcgcagcgtggggttcatcgtatgcacggaaatattaatagggctgatgcgcatttcaatgatacggtcgatctcacgctcatcaatgttcgtcagcgtgatgtagttgccgaacaaaaacgaaaggcggtcatcatcatccttaaaatagagcgtttcgcgcatgccgggcggcagctggtcaatgaagcagaacacgcacttgttgcggcaggagcgctgcctgtccataagatacgtttcaaacgcaaggcccagtgcgccgtactgcggctttacgaatttctcttcgcgccgctcgccctccgccgtttcgtataccacatgcagatgggtgttcgtctcgtaaaaacggaaatcgagaatatccgtgatgttatgcccattgattgaaataagcttatcgtgcggctttatgccggcccgctcggcaaggctgtttttatccacgccgaaaatttcaactgccacagcttttctcccttccgttttgaggtagtatgcgcgaaatttgccgctgttttacggctcggcaccaaaaaatgccgacaaaacaatagagaaggagcacgcaaatgccccttctctatctggcacaattattgtttcaggcaaaattatgcttccttcttaacaacttctctgccgttgtagtaaccgcagttaccgcaaaccctgtgaggtgtcttatactctccgcactgcgggcatttcataagggcaggagcgctaagcttccacacgttagaacgtctcttattctgtctggcactggacacttttctcttgggtaccgccatcgtcagcacctccttatattaaactaaaactttggttatctggaattattgtagcagctgccgcagggcctccagacggggatctgtctgctgctttgcacaggcgcagtcgccttcgttcaggtttttgccgcaagtggggcaaagccctttacagtcttccttacaaaggaatttcgtcggcgtcaaaaggatgatatcggaataaatcagctcgtccaaatccagctcatcgccttcaatcacgatataatcttcaaaatcctcttcatcattcaacttgttcacaatcacgtgagaaatgttgtgacaaagctctttacgcgtcaacgtcaagcacctgttgcacggcatcgaatacgcatagcgcacctccacgttcagctccgcactggaagcgaacgaacggatgctgcccttgacctgaaccggcgtgacaaacggcttacagccgtcaatctccacctccgacagatcgaccgtataatcgatcgcctgtgaaatatcctctcccgagaaatattttttcaaatcgataagcatagtttttcctcataccgtacttgatatattataaataccacgcgcggttttgtcaagaaaaatttgaaaattcggcattatgccgcgaaaaaaagtgttcggcgggtcgtttccgccgaaacactgttgcttttttcgtttttgcactgcttttcgttactgtttcgggcggtgcaaaggctttttgaggccgaaattacttcgcgacaaattcccgaacggaagccggcagttcctctgcgtcagcagaaatgagcaggcagatgttcacgttggaagattcgctgagcgtcttgagcttcgcggtgagcggctcaacttcctcaacgcccttgccggtgatcttcagggtggagtcaacgaaaacgtccgtcacatcgtagtttgcagcgcagatgccgctgacaaagcctacaagtgcgtccaggccctcaatgccgtaagcgtcggagtcaacaagacgtgccttgtgggaaatatcgtaagtaagcttaaggcccttttcgataacaacaacgttgccgttggagttctgaaccgcttcgtttgcaagctcgatgagcttcttggttttgccggagccttttttgccgattaaaagagtgatcatagtgaagtcctcctgtgtattttttccgcaggtgcggatttacgcctttttatttggaaagtcttgcttccagtgcttctttttcgccttcgtaacccggcttgccgagcagagcaaacatgttcttcttatagctttcaacgcccggctggttgaacgggttcacgccgaggagatagccggagatggcgcaagccttctcgaagaagtagatgatctggccgagggtatcctcggagaaatcgggagcggagatcacaacgttcggcacgccgccgtcgttgtgtgccagcacggtgccctcaaacgccttgcggttaatatacgccatgctcttgccctcgaggaaattgaggccgtctacgtttgccgggtcgttgccgatgacaacttcgcgcttcggcttctcaaacagcatcacggtctcaaagaggctgcgtctgccgtcctgaatgtactgacccatggagtgcaggtctgtggagaagacaacggatgccgggaacaggcccttgccgtccttgccctcgctctcgccgtacaactgcttccaccactcgttcatgagcgtgtagcacggctcatagctgaccatcacttcggtcgtcttgcccttattgtaaagaatgttgcgaatggcagcatacttgtagcaatcgttttcttccatgttcgggttgttgtaggcagcctgtgccttctgtgcgcccgccatgagtgcgtcgatatccgcaccggccacagcgatgggcagcagacccacagcggtgagaacggagtaacggccgccgacatcatccggtacaacgaaggtctcgtagccttcttcgtccgcaaggtgcttcaacgtgccgcgcgccttatcggtcgtgcagaaaatacgcttctttgcttcttccttgccgtacttcttctcgaggatctcgcggaaaacacggaacgcgatagccggctccgtggtggtgccggacttggaaatcatgttgatggaaatatccttgccctcgcagatctcaaccagctccgccagcgcggtggaagaaatactgttgccggtgaaatagatgtccggcgtatctttcttcagtgcattgtaatgctcgctcttgaggaactcgatcgctgcgcgtgcaccgaggtaggagccgccgatgccgatgacgataaacacatccgtgttcttcttgatgcgctccgcagccgccttgatgcgtgcaaattcctctttatcgtaattggtgggcaggtccacccagccgaggaaatcatttcccggacccttgccggatgccagaagcgcatgtgcactctcaacctgagaagccattgcagcgtattcgtgctcgccgataaagcccttcaagtatccgcattccaatttcaatgccatttctattgcctcctatttgcatgatgatgcttttgcacgtgtgaaaccgttttcacagccccactttatgcaaggtacaccacaagtcaaatctatgtgctttcatcatacaataatttgacgcattttgcaagtgcacaacgcggatttcatgaaaagttaacgaaggttttttttgcaaatcagatttcacgccgcttctgctgcgaaaaaacaagccaaaaaatattgcaatgcggaagaaaatgtgatggcgggcgcttcggttttcgccgtgattttgagcgactgcaccgtgtcgccgttcagcgcgacctccgccgtaccgagcacatcccccggttctaccggcgcaggaacgttttccggcaaaatgagctttatcccgatctccgcgccgcccgaggctgttaaaacgccgcgtggggcttcacacgcaagcgaaacggcgctcaccatgccgcccgtaacgggcagctcgggcagttccggaagctccggtgtcgtcagcttccagtttgcaaagccgtaatcgagcagcgaagacgcggccgaaaagcggtctttcgtattttccgcaccgagcactaccgcaatgagccgcataccgtttcgctctgccgcagccgaaatgcagctgcccgccgcacttgtcgtgccggttttcagccccaaaatgccgtcatacgtgcgcacgagcttatttgtattcacaagctgcgtctgcccgtcacgcacataatcaatccagatgagcgtgtaatcaaatattttctcgtgctgcatcaacgcgcggctcatcaccgccacatcataggcgctcgtaatgtgcccgtcttcgtcaagaccgttgcagtttttaaaaacggtgtcgttcatgcctaactccgccgcgcgggcgttcatacgctccacaaatgcgtcctcgctgcccgcgactgcctccgccaaaacgaccgccgcgtcgttcgcgctcatcaccacgcacgctttaatgaggtcgtctacggtcatctgctcgccctccttgagccaaatgtccgagccgcccatgcccgccgcgtgcgccgaggccgtgagcacatcgtccagatgcagcgtgcctgcatcgattgcctcaaatacgagcaaaagcgtcatcaccttcgtgatggacgcacaaggtcgctgcacatgggcagacttttcgtataacacctgacccgtggaggcttccatcagcaccaaagcctgcgcggggaaatccggcgtctctgcacgcgcaagcggacagaacacaccgatcagcaatacagcagccaaacagaagccaagaaaatgtcttttcataagtaaacacccccgcaccaaaagatatgcgggagtgtccttcaatcattctattaaatttcaccggcgcaccgggatgccgttttccgcaaggtaacccttgagctccggtatgccgatctcgcggaagtggaaaagtgacgccgccaaaaccgcgtccgccttaccccttgtaaacgcgtccttaaaatgctccatcttgcccgcaccgccggatgcaatgaccgggatgcccacgctttcggaaaccgcgcgggtcagctccaggtcatacccggccttcgtgccgtcgcaatccatactcgtcagcagaatttcacccgcgccgagcttctccgcgcgctttgcccattctacagcgtcaatgtccgtgtccacgcgaccgccgtttaaatacagcgtccagcccgcaccattcggacggcgcttcgcgtccatcgccatcacaacgcactggctgccgaatttatacgccgcgtccgcaatgagttgtggatttttcagcgcggcggagtttaccgaaaccttatccgcgcccgcgcgcagcagcgccgtgaagtcctctaccgtacggatgccgccgcccaccgtaaacgggataaatatgctgttcgccacgcgggaaacgatatccagcatgataccgcgcgcatcggaggacgcggtgatgtcaagcaaaacaagctcgtccgcgccctgccggtcgtattcgacagcggcctccacagggtcacccgcatcgcgtaaattcacgaaatttgtgcccttaacgaccctgccgtttttaaggtcaaggcacgggataatgcgtttggcgtacattacacgcccccctttccctgcgtcatggcggcgaagttttcgagcagcttcagtcccaacgctccgcttttttccgggtgaaactgacatgccatgaggttatttttctgcaccgccgcatgaatttccacaccgtactgcgccgcagcggtcacaacatcctcttcggcctttaaataatacgagtgcacaaagtacacatacggctcgcccgtaatgcttcggaacaacccgctgtcctttttgatttcaagcgaattccacccgatatgcggaattttcagccccggcgcagcaggaatacgcagcaccttaccttttaaaagcgacaggccggagacgcccggggattcctcgctgctctcaaacagaatttgcagccctaaacaaatacccaaaaacggcttgccggaggcgacgaacgctttaatcggcgcttccagacttctcccgcgcagctcgtgcatggcgtcgccaaacgagccgacgcccggcagcacggcgccgtcggctttcatgagaacgctcgggtcctgtgtgacttcgacctcgcagccgatatgcataagcgctttttccacgctgcggatattgcccgcgccgtaatctataattgcgatcatcccgtcgcctccctattgctttgatttaacgtgataatatagtatcacatattgttttattcgtcaacaggattttttcttcccgcaatcaaaacagctttctttaattttgggcaaaaagaaagcacgcagaaaaactggtctgcgtgcttctatgctagcttgtttggtattttaaaggcgtctttgcggacgccttttgggagaccccctaattgggtctcccacgagggaacagtccactggactgttccctctcctgtcctgattttatggcaggcaaaaggatttcgagctctgcggagctcgaccaagggtttcacccttggattccacagccttttgaaaaaggctggcgaaaacttttacgtcgcttcgctgtgcttgactttggcttaatctaaaccgtccgcccagcccatggatctttccacggccttatgccagcgtttcagcgcttttgcttcgctgcctgctgccgtttgcgggtcatacgcatttttaagcttccacacagtcctaagctcatccagcgattcccacacaccgacggccaaccccgccagcatcgcggagccgagcgcggtggtctccagacacttcggctgtctcacggcgcagtgcaataaatctgcctgatactgcatcaaaaaacggcttctcgatgcgccgccgtccacgcgcagctcggaaatttccgtgccgctgcccgcttccatggctttcacgaggtcatagctttcatacgcaatgctttccagcacagcgcggcagatgtgcgccttagacgtaccgcgcgtcacgccgagcagtgcgccccgcgcatacatatcccagtacggtgcgccaagccctgtaaacgccggcacaaacaccgcgccgcctgcgtcctccacggtctccgcaagaaggtccgcttcctgcgggttcgcgataagcttcaactcatcgcgcagccatttgatggccgagcccgcgttaaacgcactgccctcaagcgcataggtcgtctcgccattcacgcaccaaccgatcgtcgtaataagcccccggtcggagaaaaccggcttatcacccgtgttcatcagcacaaagcagcccgtgccgtatgtatttttcgccatgcccttatcaaagcagcactgtccgaacagcgcggcgtgctggtcgcccgcaatgcccgcaatcggaattttcctgccgagtatcgtttcggagcacatgcccacaatgccggaggagtccacgactttcggcagcgcgtcacgcgggataccgaacacgttcagcattttctcgtcccaatcaagcttttgaatgtcaaacagcatggtgcgcgaagcgttcgtcacgtccgtcacatagctttcgccctctgtgagcgaataaatgagccacgtatcaatggtaccgaagcgtaggcgatgctccttcgcgagcactttggccttcggcacgttatccaaaatccacttcattttggtgccggaaaaatacgggtcgatgatgagtcccgtcgttttatgaatgtactcctcaagtccctcggctgttaaccgctcgcattccggcgcggtgcggcggcactgccacacaatggcgttgcagatcgggatacccgtctcgctgtcccacgccacggtggtctctctttgattcgtgatgctgatggcagcgatgtcctccgcggtgatctccgcctcatgcaccgcctgccgcatggcgtaaagctgcgtctgcaagatctccacggcatcgtgctccacatagccgggctgcgggtaaatctgcgtaaattcgcgctgtcccatgcccgcaatgccgcccaaagcgtcaaacaacacggcgcgcgaactggtcgtgccctggtcaagcgataaaatgtattgaccgattttcaagttcaagccctccttaccaacggaagaaattgagccggtgctccttgcggtcctcctgctctcttgtgtttgtgatgactttataccgtaccacccatttcgggtcaatatactccaaaatcgcctgcggcattttgtactggaacagatgccgctggtgcttaaggctctccaccacacggagatggtccgaagatttcacatccaagctgccgacgatgatggtggaataatcgttcgggttcgtgtatttgaagttgtcgagaaaatccgcccagtcggtgtactcggtcagcttcacgtattcgcgcgggacattgagacggatgcgcaccgcacccgaaacgcgtccgccggtattctgctttctgccgcgcaccacgccgaatatggggcattcgcagtgcaggtcgagcatatcgatgagcgcggcgtactccttcttaaacgaaatactggggcttgcgcggtaaatcttgccgctttgcaaaatacgcatcacggcgccggactgatatgtgtcaataatcatgttctgataaaccctttcccttaaaaatcgcggcgatccctgcgtcgctccgcccgtttcaaaaaaacacaggcggtttttcaataccgaaattcaaatatatgcggaaatgttactttgtagcccaatcgtataaaaagcggtcaaactcgccgaccttgcgcttatcgggcttgataaggtagcgttttaaaagatccttttcgttttccaccgtccgcttatagtatgcgcccgcaatgccgcccgcaatgcacgccacggtgtcggtgtcgcacttcacgctgaacacattgcggatgcagctttcccaatcctcgctttccataaagcagcggaacgcaagcggcatggtcccctccgccgtagcatcaaacttcgccttcggccggtacgcccacagcggcttatgcacggggtattcaaactctttgttaaagtattttttcaggtcctttttgcgctcgccgtgcagcgcaaggtaaatgagccccgcggtcgcaacagcggctttcaggccctctatgtggttgtgtgtgcacatggcgctgtttttcgcttcttcctccaccttttccagcgtatcaaagtggtaagcgatgtagctgacgcgcatggccgcgccgttgccgaagctgccatagcccgtttcggcatgtccgtccagccagcgctgaaacatcgtgccgtaccccacgtctctgtacatacgcccgaatttgccataagcctttgcatagctgatgtcatttaaaagcgcgtatttcgtcgcgatggtcagcaccgtatcgtccgtgaaaaagcagttgttcccaaaaagctccacctttttatagttgaacccgctcggtttgctgaactcaaaccgcgagccggcaatgtctcctaaaatcgcaccggtcaatcggatccctccattccctgcatgatcggtttcagtataccatgttttttcttctgtttccacatatttttgtgaaaaagttccgatttcgaacagctttttgattcttttgacttttttcgccgaatacggtatgatatagtttaagataagctcataaagaggtgttcaaaatgagaaacgcaaaacggcttttggcggcgcttctgctcgcggcggcgctcatcttttcctcggcatcgtgcggcgggcagaccgaaacggcaagcgaagcgcctgccgccgcgtcttccgaaccgcagcgggattacaccgtgcagatctccaaggacaccctgcgccgcacagggctcgacatcaccgccgcggcgcaccggctggggcttacaaacgtcaccacaaatgatgacggctcctgcacgatagaaatgacaaaagacgagcgcgatgccgtctgcaccgcgctgaaggaaagtctgcacgagcagatcatcgctttgccggaggacggcacgtggccgtttataaaaagcgtcacgctttccgaagacggccgcagcgccgaaattctgagcaccaaagacctgtataaaccggagcgcgacaacgccgctgcgcaggccgtgtacattcccgcgctgctctacgcagcgtttacgggcgaggacgcagaaagcttcgcggtgcacttcaccgtaaaagacgaaacgaccggcgatgtgctgggcgagttcgattaccccgccgcagagccgaccgcttccgaaagcgatgcaagcggcacagaaagcaccgccccctcgcccgacaccgcagaataaaccgcataaaaagaacggagccgcacaggtttatcacccatgcgcggctccgttcttttactttttcgcctgtgcaagctcgcccatttctttgtgttttaattcgcgccagacggtgcacagcatcgtaatgtagcacgcgccgccgcccacaaagttcgagataacctccgcccagaacacaccgtccacaccgacagcggggatctgcggcagcaaaaacgtcaacggaatgacgatgatgaccttgcggagcagtgaaaagaaaatcgcctgctttgcgcgacccatcgcctgcacaacatactgcgccgacatttgcagcgccatcataaagcacccgaagaaataaatgtgcatggcgtgcgtgcatgtttcgagtaactgcgggtcgccgttaaaaagctgaataaacacgtgtgggaacagccttagcacgagccatacaagcaccatatagctaaatgaaacgaccgtcgtgaacacaatcacgccgcgcacgcgcttatatttctgtgcgccgtaattgaagctgaccaccggcgccgcggcagatgtcacaccgtttaccggcgtatatgtcacttcgcgaatggagttgatgaccgtcatgaccgcgacgaacaggtcgcctccgtgttgcgaaagcatcgcgttgcacgccacctgcacagcgctcgacgtaaagcccatgataaagcccgaaatgccaagcgaggtgatcttgccgatgagctttgcctgcgggcgcatgcgctttaactccaaacgaaacagcgtacgcttaccgagcaggaagcgcaccacccacacggcggaaacgagctgcgaaagcaccgttgcaagcgccgcgccctgcacacccatgtcgaacacaaaaataagcagcgggtcaagcgcaatgttcaccactgcgccgataacgaccgtcagcatgccgcggttcgcaaagccttgcgcattgatgaacccgttcatgccaagcgagaccatcatgaatacgctgccgagcatgtaaaccgaaagatagctgtccgcataagggtacgtcgcgtcgctcgcgccgaagagatacagcaccggctttttgatgagcagcaccaccatgcacaaaattacgcccgtaatgacgagcatcgagaacgtgttgttcatcacgtctgcggcgcgctcacgctgcttttcgccctcttcgccgccctgctgtgccgcaccgcgcgccatagaaaacaacggcgtaccgcccgtgccgaataaattcgcaaacgccgtcaccatcagtaaaatcggaaacgtcacgccgacgcccgtcagcgcatccaccgatgtatcggaaatatgcccgatatacatgcggtctacgatattatataagacgttcacaaactgcgccagcaccatcggcaccgcaaggcgcaggaccgttttagaaatcggtccctttgaaaaatcatcgtttttctttatatccgcagccatacttttgcctttccgaattaaaaaatagcagtatcagtatacaactttcggtaaattttgtaaatggaaagccttaaaaaatcacagacaaaacgaccccttcggtgggcaattgccgcgaaagggtcgtttgcatttactttattacagcttgagttctaccgcaaccgggcgggtaccaagcagctccgcactgcggtcatccggctgcgaggtgccgacgaagaacgtgaagctgcggctgtctacgcggcgcgtgccggtgtcgtccacaatttcaagcgcggccttcggcacggtgatctctacgtcacacgtctcatttgcaccgagtgaaaccgccttaaacgcacaaaggctgtggttgcgcaccgcgaattctgattcattgtcacgcacatagacctgcaaaatctcatgcacggcacagccctcatttttgaccgtcgccgtaatcgtatagtgctcgccgtcatcacgcatttcggctttcgtcacttccgttttaccgtaagtgaggccatagccgaacggatacagcacgccgcccgtaaagtagcggtacgtgcggttttccatcgcgtaatccgtaaacgcgggcagctcgtcggagtcgttataaaacgtcacgggcagcttgccgctgaaggaatacttgccgaacaaaagctccgcaatcgccttgccgccgcgtgcacccggataccagccctgcactacggcggagaagctttcctgcgcaaagcgcaaatccatggcgctgccggtcatattgatgagaatgacgggcttgccggtcttcgcgacaacctccatcagctttctctgcggcgcgggcagcagtaaattcgccttgtcgccggagccgacagaattgctctggtccatctcctcgccctcaagattttcattgaggcccgtcaccagcaccacaacgtcgctgtgctccgccacggtctcggcttcggaaaggcggtcgccgggcaggcccagcccctccacgcggtctttgtagaggtggcaaccctcggcgtacagcacgcgcacgtcgtcgcctacatagtcctgaatgccctccaacaccgtgatatatcttgacgccgtgccgtggtagttgccgatgagcgccatgcggtcgttcgcattcgggccgatgacgccgatcgtcttgattttcgttttatcaagcggcaaaatgccgtcgtttttcagcagcacaacgcttctgcgcgcggcttcctcgctgagcgccaaatgctccgggcactctacgacctcatagggaatggagttgtattcgcagttctcgtcaaactcgccgagcataaaacgcgtggtaaagagccgctccgccgccgtcgtgatgtcgtcctcggtgatgagcccatcctcgagcgcgcgcagcaaatgcagatatgtgttgccgcagtttacgtcacagcccatcttaatggcaagcgcagcggattccggcgcggtggtcgtgatgtggtggtgcaggtgaaaatcggaaatcgcccagcagtcggagacaaagtgtccctgaaagccccacttgccgcgcagaattttgcggatgagcaggtcactgccgcagcacggctcgccgagcgtgcggttgtatgcgcccatcacggcctccacttcgccctctttcacagcggcttcaaacgcgggcagatacgtctcccacaaatccttccggctcacctcggcgtcaaattcgtggcgaatggcctccgggccgctgtgcacagcgtagtgcttcgcgcacgccgcgaccttcaaatatttcccgtcaccctgcaaacccttgatgtacgccacgccgagctgcgccgtgaggtacgggtcttcgctgtacgtttcctgccctctgccccagcgcgggtcgcggaacaggttgatattcggcgaccagaacgtgaggcccttataaatatcgcggtcgccgtgcttagaagcttcgttatacttcgcgcgggcctccgtcgcaacgacatcgccgatttttcggatcatctccgggtcaaacatgctcgccatggcaacgggctgcggaaacatcgtcgccgtgccggcgcgcgccacgccgtgcagcgcttcgttccaccagttgtacgccggaacgcccagccgttcaacgggcggcgcatcaaatttcagctgtgaagcgcgttcctctatcgtcattttggaaacaagctcgtgcgccaaagcctgcgccttttttctgtctctcatggtaacacccctaaaaagttgttaaaaaaagtatagcacggttttattcaaaaagaaagataaaagttttatcttccggataaatcgacaacaaaaaaagcggcaaaccgaagcctgccgccgaaaatttataatttagagattcaaaaagcccgcgttcagcatggactgtgccgccaaaatcgcaccgaggcggccgctgttgaagttcacaccgccctgcatccatgccgcaaacggctcacgcagcggtgcgtccgcagaaagctcaatggacgagccaaacgtgaacgagccggacgccatgatgacgtcgcagtcgtagcccggcatggggctcggctccggcacaacgaaggaatcgaccggcgcgccctgctgaatgccgcggataaatgcgcacagcgcctcgcgctcgcgcagctgcaccgcctgaataatatccgcgcgcggctcatcgtagcgcggagtcacgtcaaagccgaagccctcaaacagcgccgccgtgaacacagcggtctttaaggcttcgcccgtgacgttcggcgcgtggaacgtgcccatgaaaagctcgcggttgttgccgagcgtgcagccgatctcgcgacccgtacccggggtcgtcaggcgatacgcgcagctttcaataaggtcgcggcggcccgcaatgtagccgcccgtcggcgcaatgccgccgcccggatttttgatgagcgaacccgccataaggtctgcgcccacagccgtcggctccattttctgcacatactcgccgtagcagttatccaccatgacaatgcagtccggcgcacggcgctttgcgatctttacaatgcgctcgatctcctccaccgtcagggacgggcgcaggctgtacccgcgggagcgctgaatgtacaccatgcggtgcttcggcgtgatggccgtctccatgccgtcatagtcaggcgtgccgtccggcagcaggtcaagctgctcgtagtttatgccaaactcctttaatgagccgttgccgtcgcccgtaatgccgatcacgccgcgcagcgtatcatacggcatgccggtaacgctcagcatcgtatcgcccgggcgcagaacgccaaaaagcgctacggtaagcgtatgcgtgccgctgacaaaattatagcggcacagcgcgtcctccgcaccgagggcacgcgcgtacacttcgtccagcacgtcgcggccgcggtcgccatagccgtagcctgtcgttgccacaaagtggctctcgctgacacctgcctgcatgaacgcagcctgcatcttctcctgattataccgctgtgtttcggaaattttcgcaaggtacggcgcagccttctgctccgcttcctccgccgccttcagcacgcggtcatcaattttaaaaaactcgtacatagtaaacccgctttcgcaaacgcaaaagccttcctttatctgaattattttaattgcataattttccctgcgcccatgcgccgcacggtttatagcccaaagcgtcataaaacgcctcgtttttgctttcttcgcgcaggatatacaccgtgccgctcggcaacattcgctccatttttcggataaccgccgtgccaagccccctgcggtgaaattccggcagcaccgccacagcagaaatgaggcccgcgctttcgccgagcactgctgcagccactgcgacggtcttcccatctgccgaaacacccgcgcagcgcaccgtgccgtgccgcatgcggtgggataaatcgaggtaaaacggctcgaactcccccaccatgccgtttgctttcagcacagcataaatctctctcggagaaatttcctccgcaggatgcacagccccatttcgcagcactttttgcaaaattgcgccgctttcggtgatgtttagccccagcttttcggcattctccgcgctgcacacgacttcatttgtgcccaccgcactcaaaaacgcacgcgcctcgtccgcgtcggcgatctcccccgcaatgcagacggagccgtccgtttttccgtaggcggattccccgtccgtccaaaactgcgcgaacgactgatggaagccatacgcctgcgctttagacaggatctgacaaccaaacggagaactcacgcacggcatagagagcgcttctaaattttccgcaagacggatcattacagcttgccgccggaaatttccgtcatcatcagcgctatcaggtcaataaccgcctctatgtccttttcagtcgtcatcgcgatcgcgctgtggatatagcggcacgggtgcgagattgtcagcgtcttcacgccgccgcgggaaacgtgaatggtgcccgcgtctgtgccgccggcgcgcacggtcttcggctgcaccggaatattgttttctttaccgagcgccatcgcgcggcggaaataatccttcgggtaaacggtgcgcatatccgtaagggaaatgactgcgccgccgcccattttgcatgctgcgtccgtcgggctcacgccgggaatgtcgcccgccgtcgtgccctccagcacaagcgccgcatcgggctccagaatatacgccgccgtgcccgcgccgcgcaggccaatctcctcctgcgtggagaagacgaaatacgtgtcgtattcgagcgggcgctgcatcagcgtgataagcgcaaagcagcccacgcggtcatcgagcgccttcgccttcaccgtaccgtgcacgcgctcaaagaacggcacaaagcacgcgttgtcgccaatctgcaccaatgtctcggcttgctcacgtgtatctgcgccgatgtcgatggcgagttcgttcacgggtacgggcttttcaaattcgtcgcccttgagcaaatgcaccggctttgcgcagatgacacccggcgttttgccgcccaccagcacatcgcggccggagagcacctccgggcggatattgccgaccgtcgtgaacttcaaaaggccgttttccgtaatgtttgtgatgacaaagcccacttcgtccatgtgagcgcagagcatcagcttcttctcgggacgcttttcgccctttttaaacgccagaatgttgccgagcggcgaaatgtgaatctcgtccgcatacggctcaatttcacttaagatcacgctgcgcacatcgtcttcctcgccggaaacaccgatggtgcgggtaagcttttccagaatttcatagttaagcattcggctgcgcctccttatccgtgatatacgccgcgatgagctttgcaatgttctccatatcctcaaaatcgcagacctccgccggggtgtgcatgttgcgctgcggcacggagatgagccccgtgcgcacgccgccgcgggtggtgctgatctcgtcgcagttcgtacccgttctgccgcccatggcttccagctgatacgggatattttcgcgctttgcgagctcgacaagctttttgctgatttttctgtccagcgccgcggagaagccgatcatcggccctttgccgagctccgcggtaagcatgctctccgcgtccggctgctttgcgaacgaaacgtccacggcaatggcctcggtgggctcaagtgcatacgcagagacctgcgcgccctgcccgccgacctcctcctttgtggagcacagcaccataacgcagcaatcggggttctgttcatttgcaagctgtgcggcgcggatgacgcacgcgcagcccgcacggtcgtcgagcgccgtgcccgtgatgcggttgcccatgagctttttcagcgggcgcgtcagtgcggcgcggtcgccgacagcgacgagcttctccacttcctctttcggaagccctaagtcaatgcactgctccgcaacgggctttatcttatcatcaccctttgcaaggtgcggcggcagcgtgcagccgatgcccgtgacggtctccgtgccgaacacggtaacggggctgcccggcagcgtgcggcggtccacaccgcccacattcgtcacatgcagaaagccgttttcgtcaatgtccgtcacgatcataccgatctggtcaatgtgcgcgtccagcaaaatgcggcgcttagaactcaaatcgccgaaaatgcccacaacgccgccaagctcgttctcacacacctctttgcagaagccgagctcctttttcgcaactttgaacacgtcgccctcacagccggatgtgccgtgctctgcgcacagcgcgcgggtgaggcgttcaatctcttcaaacatgatattccctcctaaagcctgatttataaaaacaaaaaccccgcattccgaatggagacccatcgaaaagcgaggcgcatttccgcaagtattgacttactttgtgaaatacataatgatgttgatcacaaggaccagcacaaagaagccgatcgcaatgaactttgtccaacgagcaaggaacgcatccatggaacgcgccttattcttggaaaggaacgtatccgcgccgccggtaatcgcgccgaggctctgctgatggccttcctgcaacagtacgacaacgatgatcgccagtgcgaaaagaagcagaacgataccgaaaataatttcaacagcacccatatattttacctcctcttcaagagacttaacgctaattttattcgtagcttaattatgataccatacaaagcgggattttgcaacaggattttttgcttttttcctgcatattccgccgtcctacgtccatactgataccaaggcagtcacagtcaggcgtttgtgcgcaccaaaacggaccgtgcggcaaaaccgcactttcgcgtcacacgagcggggtctttcccgggcgggcggcgcagtccatggtgcggactgtatgctgcccgcccttcagtaggactgaacgctccgccgcgcaggccacacgcctgcacaaacggaacgccaaacggtcttgccggagggctgattttttacagcgaaatctgctcgccgccctcctctccgttcggcagtgcgccgagcgccggaatcttctttctgtaccgcgacgggttctgcagctcgtcttcttggtagatatgcgcgtccgtaatgcgttggccttttttcaggttcatcaccgccacgccctgtgtgctctttgtcgtcttcggggcgatgagcgccgtgttcatgagcagtcgtctgccgcttgaggacgtcagcagcacatcgcagtcttccaaaatttgcagcgccgccgcaagcggggccttgtcggaatacgcgttaatgagctttctgcggttcgtcttcgtgtagtacgcggagagttccaccttggcgaccttgccgttatcgaaaacaaacagcatatagcccttgaagtcggtcgttacagccatgtacgcagcgctttcgccctcgtccatctgcacgcgcgcaggcacatattcgcccatcacgctcgctttggtgtcggcaaaatccgccgctttcagcttatagacctgcgctttgtcggagaagaacaaaagctctgccgcgtttgtcgattccatctgttgggcgatctcgtcgccctctttcagcttttggtcgccgcccatgcgcagggaaagcggggtgatcttcttaaagtagccttctttcgtgaaaaacaggttcaccgggtaatccggcacagtctccacgggctcttcttcggcaatttcctccgcgtacaaaatatggctgcggcgcggctggccgtacttctgcgcgatttcattcagctcgcgcacaataatcgtcttaatgcgcgtttttgaggccagaattgcctcaaggtcacgaatttcttcctctaagctgttcacctcttcggtgcgctttaagatgaactcgcggtttaaatggcgcaaacggatttccgctacatattcggcctgaatttcgtcgatgccaaagccgatcatgaggttcggcacaacttcgctttcttcctcggtctcacgcacaatgcgcacggctttgtcgatgtcgagtaagattgccttgaggccgtagagcaaatgcagcttctctttcttcttcgtgaggtcgtagtgcgttctgcggcggacgcattccattctgaacgccgtccactcctcaaagagctcacgcacacccagcacacgcggaacgcccgcgatgagcacgttaaaattgcaggagaagctgtcctccagcgtcgtcatgcggaacaaccgctgcatcagcttatcggggtctgcgccgcgcttcaagtcgatcgtgatcttgagtccgtccagacccgtctcgtctcgaatgtcggtgatttccttcaccttgccctgcttcacaaggtcgatgaccttttccacaatggcttcaatggtcgtcgtcggcggaatctgggtaatatcgatgcagtttgcagatttatcatacgtgtagcgcgagcgcaccttgatgctgccgcggcctgttttgtagatctgctccatcgccgcgcggtcgaaaataatctgcccgccgcccgggaagtccggcgcctgcatcgtcgtaaaaatgtcatgcttcgggtcacggatgagctccgccgccgtggtgcacacttcggcgagattaaacgggcaaatggacgacgccatgccgaccgcaatgcccgtgtttgcgttgacgagcaccgaggggaatgccgccggcagcagcgttggctctttcatcgtactgtcgtaattgtcgacaaaatccacggtgtccttgtcgatatcgcggaacagctcgcggcagatggggtcaaggcgcgcttccgtgtaacgggaagccgcccacgccatgtcacgggaataaaacttaccgaagttgcccttagagtctacataggggtgcaaaagcgcctcgtagccgcgggaaagacgcaccatcgtgtcgtaaatcgcactgtcgccatgcgggttcagcttcatcgtctgaccgacgatgttcgcgcttttcgtgcgcgccgagccgagcaggttcattttgtacatcgtatagagaagctttctgtgcgagggcttaaagccgtcaatctccgggatggcacgggacataataacgctcatcgcatacggcatgtagttctgccgcagcgtgtcgttgatgtcctgcgcctgaatttcacccgcgcccgcaataaagccctgcatcttcggcgtattttctcttttcggctgtttttttcttgccatgctttacgcttcctttcgtcagagctttaagaaatatcgaggtcatcgaggtactcgctgccgtgggtcgcaatgtagtccttacggcccgtaagattatcgcccagcaagatatcaaacatctgcgccgtcctttcggcatcgccgggcttcacctgaatcaacctgcgcgttttcgggttcatcgtcgtcaggttcatcatgtccgggtcgttttcacccagacctttcgagcgctgaatcgtaaacttctggccctcaagctgcgtcaaaaactcgtccttttcgcgctcgttatacgcaaaatacgtcttgtccttcgccgtaatttcataaagcggcgattccgcaatgaacaccttgtgctcttcgatgagctgcggcgtcaaacggtacagcatcgtcaacagcagcgtgcggatctggaagccgtccacgtcggcatcggtgcacaggatgatcttgctccagcgcagcgcgttgatgtcgaacgacgcaatggacttgttcgccttcgactttacctgcacgccgcagccgagcatcttaatgagatcggtgatgatctcacttttgaaaatcttgtcgtaatccgctttcaggcagttcagaattttaccgcggatcggcatcacggcctgatagttcgggtcgcgcgcctgtttgaccgcaccgagagcggaatcgccctccacgataaaaatctcacgctcggaaacatccttgctgcggcagtccacaaacttcgccacgcgccccgtgatatccattttggccgtcagcttgccctttaagttgaggcgcgttttttcggcgtcctcgcgggagcgcttgttgataagcacctgtgcgccgattttctccgcctcaatggggttttcgatgaaataaatttcgagattatggcggagcatctccaccatcgcttcctgaatacccttgttgttgatggccttctttgtctggttctcataggaggtcatcgtggagaacgaggacatgacgataacaaggcaatcctccacgtcctgaaatttaattttgctttcggatttattatacttgccgttctgcttcaaatacgcgtcgatctggtacacgaacgcgttctgcacggccttgtccggtgcgccgccgtattccagccagctcgagttgtggtagtattccgtcaaatgcacgcggttggaaaatgccaccgcagcgttgatcttcacattgtaaagcggcaggtcttcgcggtcgcgcacgcgcttttcggactgccagaactgcacggaggtcagcgcatcttcgcccaccagctcgcgcacatgatctaaaatgccgttttcgtagcagaattccgtcgtctcgaatttgcgcggcgaaacttcattttttaaaataaacttcacgcccgcgttgacgatggcctgccgcttgatgatatccgtgtaatagtccgccggcacgtcaatgtccgtaaacaccttgatatccggcttccagcgaatgcgcgagcccgtgaccttcttgccgtaaggctccttattgagtccgcctatgttctcaccgtgctcaaagtgcagcgtgtagcggaagccgtcgtagcgaatatccgcgtccatgtattcggaggcatactgcgtagcgcatagaccgagaccattcaggcccagcgcgtaatcgtagttgccgccgtcattgttgttatacttgccgcccgcatacatctcgcagaacacaagctcccagttgtagcgctcttcgcgcttgttgtaatccaccgggatgccgcggccgtggtcttccacctcaacggaatggtcggcatagcgcgtaacggtgatctccttgccgtagccctggcgcgcctcatcaatggagttcgagaggatctcgaaaatcgcgtgctcgcagccgtcgagaccgtctgagccgaatatgaccgccggacgcagacgtacacggtccgcgcccttcagacttttgatgctgtcgttgccgtaggtttgctttttagccattcaccatgttcctttcctcaagcgggcaaaataacacccgcacgggattgcccataaacaaacgtaaagggaatgcaaatgagcacattccctttcgttaaaaatttattcgttcgtgttcgcttccggttccgtttgcgcttcggtcggcagctctgtcgtttccggcgctgccgcttctgccgggatgatgcccgcagcggcagtctgtgcgctcggcagcagcttgccgttcatcacgtcaaggaactcgtcggcgtccagcttttcgcgctcaaacagcacacccgccaaacggtgcagcaggtcaatgtgttcggagagcaccttcttcgtcttatcgtacgcgtcgcagatgatggacttaatctcctcgtcaatctccgcggcggtctcctcggaatagttcgagacatgacccatctccttgccgaggaacggattgctgctgtccgcaccgtacgtgatcggaccaagacggtcgctcatgccgtactttgtgaccatcgcgcggacgatcttcgtggcacgctcaatgtcgttcgatgcgcccgtggaaatatcgtcaagcaccaaggcttccgccacacggccgcccagcagcacgatgagctcctcgcgcatctcgttgcggctctggtaggacttatcctccgtcggcaggtgcatcgtgtagccgcctgccatgccgcgcgggatgatggaaatctggtgcaccgggtcctgcgaatcgcagaagtacgtcgcaatggcgtgtcctgcctcgtggtacgcggtcagcttcttctctttgtttgtcatcacgcggctcttcttttcggtgccgacaacgaccttgatcgtcgcttcctcgatttcctccatcgtgatggacttgtggtccttgcgggccgcaagcagcgccgcttcgtttaagaggttctcaaggtctgcaccggtaaagccggcggtggattttgcaatggtagaaaggtcaacatccggtgcaagcggcttgccctttgcatgtacgcgcagaatatcctctctgccgcgcacatccgggtagcccaccatcacctggcggtcgaaacggccgggacgcatcaaagccgggtccagaatatccgggcggttcgttgccgcaatcatgatgacaccctcgttcgcgccgaagccgtccatctcaacgagcagctggttcagcgtctgctcacgttcgtcgtggccgccgccgagacccgcaccgcgctggcggcccacggcatcgatttcatcaatgaagatgatgcacgggtggtttttcttggctttgtcgaacagatcacgcacacgcgatgcaccgacgccgacgaacatctccacgaagtcggaacccgaaatggagaagaacggcacgccggcctcgcctgcaacggcgcgcgccaaaagcgttttaccggtgcccggagggccaacgagcagcacgcccttcgggatgcgcgcaccgagctcgttatacttattcggacgttttaagaactccacaatttcgcgcagctcttccttttcttcgtccgcgcccgccacgtccgcaaacgtcgtgcggcgcttttcgtcgtttatttgcttgactttcgctttgccgaaattcatctggtttccggctccgccgccgcccatgcgcttcatcatgaatacccagaacgccacaagcagcgcgatcatcagtaacgtcggaatgaggctgacaagccagctcgtctccgccgggcggatgacatcctgcgtcatgcggttattcggatgttcctcgttatacgacttgatgtagtccgaaacgtcgttgtagaacaggttcacgttcggcaccgtgtagcgcacaacggattcctttttgctgctgtcctctgtcacggtcagcttcatctcgcccgtgcccaggttcagcgagtatgcgctcaccttgccgtcttcaaagtaagacagtacatcggagtatttcagccccgtctggtctgccccgcggtcaaacagaagcaaaagcagcacgacgagcaaaatcggaatgccgaggtagatcaaaagattgcgaatgatttttttgttgttgctgttcaagttccgacctcccggaaatcaaattggatacaaagtgtatccttaaatagaaacagaaacttttttatcaaaacggaagcttagacttcaccgtagacttcaggtttcaaaacgccgacaaacggcaggtttctgtacttctcatcaaaatcgagaccgtagcccacgatgaacgcatcgggaatatcgcagcccttgtattttgcgtagacctccacctcgcggcgctccggcttatcgaacagcgtgcagatctcaatgctgttcggctcgcggcttttcaaaaggtttacaaggtagtgcagcgtcttgccactgtcgagaatatcctcaacaatcacgatatcatagcccttcaggttgatgtcgaggtccttgatgatcttgacaacgccggaggtcttcgtgccggagccgtagctcgaaacgcacatgaaatcgatgcgggccggaatcgtaatggcgcgcataaggtctgccataaagacgacagaacccttcaaaacgctgacaagcagcaggtttttatcggcgtaatcgtgggaaatttccgcgcccacgcgcttgaccatgctgtcgatgtacgcttcgctgtacaaaacttccttgatatcgtttaacattgtgttttccattcggatgaccctttcctcaaaattctttccgctttatatgcgggttatgcctgccgtgtccgtcaccgtaagctccagtgccgggaaattcggctttgccgcatagccctccgccgcgccgaccgcttcgatccagatgatctcaccgtctttttcaagcagcagcaaacggtcgcgcgccgccgccggaatgcgcagttcattcaggatttttttgaccgatttcgtcacgccgcgccctgcgggtctgaaaacatcgcccgcgcgccgcgtccgtactctcggaacattcgtaattttatcacaatccgaaaagttttggaataacaaattatgaactttccggttgatttcttctttttcgggaatttttttctccacaaacagcgttttcccgttcggaagcacgttttcgcccgctctcagcggaacagaaaacacattccggtcttttatctcccggttttttcgcaccgtgagcgtgtcctgcttcgcctccagcacgatgtcccccggcaaagagaggctgccgcccatgaaaacgcagcccgccgccctgcaaatgtgctcataagagagccgcccgtaagacgataacagcagttccagcgccgcgcgcagcaccgcctcgtgtgcggtccgcaaagctttcaagtcatacccgtaaggcgttttcgctttacagagcaattcattcgcgcacgaaaacacaaattcattctgcaaccgcatgctctccgcaaagcgagacgtcgcctgcgtcatctgcgggtttacattcttcagcaccggcagcacgctgtggcgcagcttattgcgcgtgtagtccaccgtcaaattcgtggaatctgtcacatagtcaagtcgatatactttacaaagatgttccacctctgcgcgggaaatgttcaaaatcgggcgataaattctgccgcgccgcggcggaatgccccccgcgccgtgcggccccatgccgcgcgtcaggttcaaaagcagcgtttcggcattatcgtcggcgttgtgcgccgtggcgatgcacccgtttccccctgcttcctccgcaaagcacgcgtagcgcacgcgccgcgcgcattcctccacgccctcgccgcttacggccgcaagcgcgggaatatccttatagatcaccttgcagtgaagttcaagtgctttacagtagtcctgcacaaattccgcgtcgcggtcggcttccgccccccgaatgccatggtgcacatgcaccgcaagcaaacgctccgcgccgtacttctgtacaagcaaatacgtcagcagcacggaatccgccccaccggaaagccccacgacaatttttcccgtctccggcagatcataccgcacgcgggcgaggatgtcctcagctttcatgacgcacaacttcctgcgatgtaaagcgcatgaactcaccctgccagtgcagcggcacgctgcgcagatcgccgtgacggtttttcgccacgataacctcggcgctgtttttgtccacgtcttcgggcgaagccgattcgttcgcgtagtatgcgtctcggtacaggaacagcacgatatcggcgtcctgctcgatggagccggaatctcgcaggtcagaaagcaccgggcggtgctcctgccgcttctcacccgcacgggcaagctgcgccaatgtcacaaccgggatattcagctctttcgccatgatcttgaggcttcgcgtgatctcggaaatttcctgcacgcggttatcaatgcgctttgcactgttcatcagctgtaagtagtcgatgatgacaagatcaacgtcttttaaacgacgcacttttgctttcatctccggcaccgtaatgcccggggaatcatcgaggtacaaatcagccttagagagaatatcgcccgcctccacaaggcgcgtccattcgccctccgtcaagtcgcccgtgcgcagctttgtaccgccgacgagtgcctccgtggaaatgatacgggaagcgagctgctccttgctcatttccagcgagaaaaacgccacgcgcttgcccgccgtgatggcggcatggcgcgcaatgttcagcgcaaagctcgttttgcccatgccgggtcgtgcgccgatgatgacaaggtcggagcggttcaggcccgtgatcgtgttatccagctcgcggatacccgtagggatgccgcggtacaggtctttgtccggcgaattcaagcggtcaaggcgttcaaacgtctcaaacagcacttcgttcaggcgctcaagaccctttaacgccttgccctggcggatgtcaaaaatgcgctgctcggcggaatccaagaggagcgaggtttcgccggtgtcctccatggcgtcatccaaaatgccgcgcgccgcctgaatgagcatacgcaaatcgtaacggtcacgcacaatggtgcagtaacgctccacattcgagacgctcggcacaagctgcgcaagctgcatcagatacacctttccgctgccttcatcgaagttttcctcttcgcgcaggtgctccagcagcgtgacgaggtccaccggctggcctgccgtgaacatatcgagcatcgcgctgtaaattgtgcggttattgacctgataaaaatagtccgcgcgcggcagcatttccgccacggtcgagagacagtcgggctccagcaacaccgcgcccagcaccgcctgctcggcctctgcgctgaacggcatcaccgttccgggcagtgccggcgtattcagttgaaaattatcttccggcatttttaccacccttttttgagtgaaattacttcaaagtgaaaacgatttccgaatcgtaaacgacttttagtcattgcaaaatttaatgctgcgcatcaaggaaatcaggcttttactgtgcttcggtcaccgataccgccagcttcgcggtgatgccgttatagagcttcacctcaatgtgatagccgccgaacgccttgatgtcggtgtcgaggtgaatcttgcgcttgtcgatgtcgaagccgtactgttttttaatctcctgcgcaatctcctttgcggtgacggagccgaacagtctgccgccctggcccgcctttgcggtgatgcggacggtcttgtccttcaaagcttccgcaatacgctgtgcttcttcggtctcggttttcaccttatatgccttggaggcctcggcgtttttcagctcgttcatcacctgtgcgttcgcttcctttgcaagcttgcgcggcagcaggaaattgcgtgcgtagccttctgctgcattgatgagctcgccttttttgcctacaccttttacatctgctaaaagtacaactttcatggtcgtatctcctatcgtttaaatctatcgctaaagcagtcaaacggcttcgcgccgctttgccgcattagttattctttttcgtcgcttcggaaagcttttcgtccaacacgcggatgagtgccttgcgcacatcgttcgtggtgctgtttttaatctgcgcgcccgccatgttgaggtgaccgccgccgccgaattcctccagcaaaatctgcacgttcacgtcgccgaggcttcgtgccgaaatggcaatctcattgcccacgcggaaaatgacgaacgacgcgcgcacgccctgaatggacagcagctcgtctgccgcctgcgccgccgcaatgcgcacgttcgggaattcccagttggagcacgcaatggcgcagcccttgtagatttccgcacccgccacaagctgagagcgctctttataggtatcgagtgaatttgcaaacattttcttcacttccaccgtgtcggcgccgcggcgctttaagtaggcggaagcttcaaatgtgcgcacgcccgtcttcaaaatgaagttttttgtgtccagcatgatgccggaaagcagcgccgtcgcttcttttttattgagcgcggagctgttgatatactgcacgagctccgccaccatttcggaagccgagctggcatacggctcatggtaaaagatgatcgcgttttcaatgtgcgtcaccatcatgcggtggtggtcgatgacgaccacgcgcggaatggcctttaaaacttcttgactctccacaaacgaggtggaatgtgtgtccaccacaatgagaagcgagcgctgcgtgcagcggtcgagcgcctcctgcggggtgataaacatgttttcatactccggctgatgctcaaacgcgttgataagcgtcgtcgccatagagcggcccttgtcgatcacaatgcttgcacggcggtcaaggcctttcgtcacagccgcccacatgccgaccgccgcgcccacggcgtcaaggtcggagttcgtgtgccccatgatgaaaatatggtcgctcgatttaatttggtcggaaagcgtcgcggcaataacgcgcgtgcgcaccttgtcgcgcttttcaacacccttggagaggccgccgaagaactcgtatgtaccgtcctgctggtagatggccacctggtcgccgccgcggccgagcgccatttccagtgcctgacgggcatgcagttcgctttccgtcgccgttacgcccgcgcggccgatgccgatggagatcgtggcagatatgttattttcacccttcacggcgcgcacgctgtccaaaacggcaaagcgcttcgttttcgcttcttcaatgtgctggtcatccgtgatgagcatataacgcccgttcgtcatgcggcgcagaaagccctccatggtgtcgatcgcccagctgcgcaggacggattccacctcggacgtgatgcgggaatcctcgctgccggaggcatcgcgcgtcagctcctcgcggttatcaaacgagataaccgcaatgaccgtgcgcttttcgcggtagtcgcgctgaatctgcttataatacgtgtcgtccacaaagtaaagcacactgccgctttcggtgcgcaggccgtaggccgtaaactcgcggtcgccgtaggaaacggaggttccgttttcggataaaatctgacgcaaagtcttcgggtaaatgtacgccgcaatgttatcgccgcagccttcgccgttttcggtgaataaatcctgaaagcgctcgttcgtccagacgatgtcgcccgccgagcccagcaccgcaaggggcagcgcaaactgcccgaggttgcgctgttcatcggcggaaagcacctttctcgcagctctgagcgccgtgtacacatgcacgcggtaatgcaggtcggtcatgataaccgctgccaaacacaggccggaaaccgtgatctccaccgcaaacagaatcttattctgcgtatagctgaagcacgccataatgaacatgaccgctgccataacataatagaccggcgaggtcgcccagatgcgtcgcttgttcatttcccgtctctccttctgaggggaacccccaagaaactaatctaacttaaactgaatttaaacttccatgatgatcggcaggatcatcgggctgcgctttgtgcggttatataacagtctggaaaggttgtcgcgcacgcgcagcttaatggcgctccactcgcgcacgttttcgtccgcgcactgctcaatcgtgctgttgacaagccgtctcgcctcgtccatcagcgcctcgctctcgcgcacatacacaaatccgcgggatacgatatccggaccggaaacaactctgccggagcctgcctcaatcgtgcacaccgcaatgatgagaccgtcctccgcaaggtgctttctgtcacgcagcacaatgctgccgacgtcgcccacgccgaggccgtccaccataaccgcgcccgcctgtacatcgggcagctgtttcatgtagtcttcattaatctccaccacgctgccgacatcgccgatgaaaatgttctccggcggcatacccatgctgacggccacgcccgcatgcttgcgcaggtgcttctgctcgccgtgcaccgggatgaagtacttcggcttcgtcagcgcctgaataagcttcagctcttcctgacacgcgtggccggaaacgtgcacttcgtacatggattcgtacaccacatcgcatccgcgcttcaaaagctcgtctacaacggtgccgaccatcttttcgttgcccggaatggggcgcgcggaaatgatgatcatgtcgtcctcaccgaccgcgacctgacggtggtcggcaaacgccatgcgggtaagcgcagacatcggctcgccttggctgcccgtcgtgataagcacaatctgctccttcgtgtaacgggagatcatgttgagatcgatgagcagaccgtccggcactttgagataaccgagctcgctcgcaatggacatgacgttcaccatgcttctgccggaaagcgccacttttctgccgtacttttccgcgcagttgataatctgctgcacacggctgatgttcgacgcaaacgtcgcgatgatgagccgctttttattcgcttccgcgcgggcaaagagtgcgtcaaacgtcgcgttcaccttctgctccgtctgtgtgtagccggggcgctctgcgttcgtagagtccgccatcagcagcaaaacgccctcctgaccgagctgcgcaaagcgcgcaaggtcgatcatgccgccctgcgtgggggtgaaatcgatcttaaagtcgcccgtgtggacaatgacgcccgcaggggtgtgcagcgcaagacccacagcgtcggaaatggagtggtttacgtggataagctccacgtcgaagcagccgagctgaatgtgcgagcccgccgttgtgacgttcagcttcacatagccgaggttgtgctccttgagcttattcgcaatcagcgccaccgtcagcgccgtgccatacaccggcacattgatctttttgagcaaatacggcagggaaccgatgtggtcctcatggccgtgcgtgatgacaataccgcggatgcggtccttgttcttctcaacaaatgtgaaatccggaataaccgcgtcgatgccgggcatttcttcgtccgggaaggcaaggccgcagtccacgataaccatgtcgttttcgcactcaaacagcgtgaagttcttgccgatctcatttaagccgccgaggaaatacgcgcgcacagagggcttctgctttgtgcgcctgcccctgcccttgttatttttcgtctgcgtgctttttgttgtcttagcgggtgctttttcaccgtttggggccgattttaccgttttcgtcgtctttttgtgtgcgtccgtgttttgcgcggtacgcgtgcgcttcggcttcgcctcttttgtttcgctcacggtttgctgtgccgcttcttcttttacctgcgcgttttccgttctgcgcgttttctggcgtctcaccggcttttcgatggggccggaaatcttgccgatgaagctttcccctgcaccgctgaggggctggtcctgctgctttgcaggcgcgtcgccgagcgacgttaatttcgtcatttttctgattcttttttctgccaaattgaccttcctttcaaataacacaggcgcactgtcgcaattcacgcaaaaataaggtatacaaaagcaccaaccgatgctctgcgcagtgtcgcctttcggcatgagcagaataaaacgcacgcaagtccgcgccgccttctgcttttctttcttctgttttttccgttcaacacatgtaaatcaaaacaccgcagcgtttttttcactatccgttacacgtaccgtttacgtgcaaagtgtcagccgttcacgcatgcgaaaaatacccgcacacaaaaagataattctattttacgctattctccccgtgctgtcaagccgcgtgccgtttcgctctgtacggagtttgggcacaccgcagaggttctattcccatattctcccgattttttgtgttctgtacgccggttttcaaaaaacagccgccgttttcttccattttgtacggaaaactctcgttcggggtctttatttcctgctttttcagaaaaattttgactttctggaatttccctattgaaaagtataccaatttggtgtatatttatctcgctgaggaaagaatatgcgtatcccgaccgatcgaccccaaatgcgttttctgttccctcacaaaaaacactatccgaaaggtactgataaagctatggaaaataacggcaagaagatcatctatgcggacaacgccgctaccactgccgtctcccctgcggtgcttgaggctatgctgccgtactacaccgaatgctacggcaacccgtcaagcctgtatgcgctcggcacggctgcaaaaaagccgcttgaggaagcacgtgcaaaagtagcaaaatgtctcggtgcagagccgaatgagatctacttcacaagctgcggcagcgaaagcgacaactgggccattaagggcgcagcgcacaagatgctgaaaaagggcaagaaccacatcatcacaagcaagtttgagcaccacgcggtgctgcacacctgcgcagcgctcgaaaaagagggctttgaggtcacgtacctcgacgtgcatgaaaacggcatcgtcgtcccggaagagctcgaggccgccatcaccgataagaccggccttgtcaccatcatgtatgccaataacgagatcggcaccatccagcccatcccggagattggtgaaatctgcaaaaagcatggtgtttggttccataccgacgccgtacaggctgtcggcaatgtgccgatcaacgtaaaagagcagaacattgacatgctgtccctcagcggccacaagttccacggcccgaagggcgtcggcgtgctgtatatcaagaagggcatcatcctgccgaacctcatcgatggcggtgcacaggagcgcggccgccgcgccggcaccgaaaacgttgcaagcattgtcggcctcagcgttgcgctcgagaacgccatcaatacgatggacgaaaagaacgcaaagctgcgccgcatgcaggataagctcatcacggagctttcaaagattgaccgcagtcatttgaacggcgaccgctaccaccgtctgccgggcaacgtgaacttctccttcgaaggcgttgagggcgaatccatgctgctgatgctcgaccttaagggtgtctgcgcttcttccggcagcgcctgcaccagcggttctctcgacccgagccatgtgctgctttccatcggccttaagcacgaggtagcccacggttccctgcgtctcagcttcagcgacgtgaacgacgagagcgacgccgattatatcatcgaggtgctcccgaagatcatcgaccgtctgcgcgccatgagtccgctgtgggatgcgatcatccacggccgcacgatctcttaattttaaaataatccggtacgaatgtacgaaaggaaatgaaacgatatggcatacagtgcaaaagtaatggaacacttctccaacccgcacaacgttggcgaaatcaaagatgcagacggtgtcggtgaagtcggcaacccgaagtgcggcgacatcatgcgcatgtacatcaaggtcgataacgacgtcatcacggacgtaaagttcatgaccttcggctgcggcgcggccatcgcgacaagcagtatggcgaccgatcttgtaaaaggcaagacgatcccggaagctctgaagctgacgaacaaggcggtcatggaagcgctggacggtcttccggccatcaaggttcactgctccgttctggccgagcaggccattaaggctgcggtctccgattactaccgccgccgcggcatcgaccccacccccatcgtgggcgagatcaaggatgccgacgaagcacacgagcacggcgtctccgaagaagacgaataagttaagataacgaaatctcctgcctctttcgggaagcaggagattttttatgttctgttctttttatgctttgtttttctgttccggctttgcgcaagagccggcgcagtgggtgcagtccccgccgcagccgccggtctttcctttttgaatggcccgcacagccaaaaacaccgctatgacgagcaaaaggaacacaagagccgtgcctatgttcagcttatccatcatataaacagcgaccccatgccgtacacaagccccgctatcagccacgcgatgacgcactgaccgatgacgacgcctgccgcccacttaccgccaagctcgcgctttacggacgcaatggccgccacacacggcgtgtacagcaggcagaacacaagcaggcttgcggcggaaagcggcgtcagcagcgttgcaagcgccgtggaggagccgaacagcaccgtcaaggtagacaccacgctttcctttgccataaagcccgtgatgagtgccgtagagatacgccagtcgccaaagccgagcggcgcaaaaatcggtgcaatccacccggcgacgaccgccaaaatgctgtctttggaatcggaaacgatgttaaagcgcaggtcaaacgtttgcagaaaccaaatgatgatggtcgcaacaaaaatgaccgtaaaagcgcgctgtaaaaagtccttcgccttttcccacaaaagctgcgctacgtttttcgcgcccggcatgcggtagttcggcagctccatcacaaacggtacagcctcacccttaaacatcgtgccgcgcatgagcaaagccatcaaaataccgaccaaaatgccggtgaaatacaaaatgaccatcacaagtgcacccttgcccgggaaaaacgccgccgcaaaaaagctgtaaatcggcagctttgcggagcaactcataaacggcgtgagcagaatcgtcattttacggtcgcgctcggaaggcaacgtgcggctcgccatcacgcccggaacggtgcagccgaaaccgatgagcatcggcaccacactgcggccggaaagtccgattttgcgcaataacttatccatcacaaacgccacgcgcgccatgtatccgctgtcctccagcatggagaggaagaaaaacagcgtcacaatgaccggcagaaagttcaaaacgctgccgacgccggtgaaaataccatcgatgacaagcgagtgcagcacagggttcacgttcgctgccgtcatgccgcggtcgacaatatccgtcagcgcgccgatgcccatgtccagtaaatccgataaaaacgcgccgatgacgttaaacgtcagccagaatacaagacccataatgccgataaacgccggtattgccgtgtatttgccggtcaaaacgcggtctatcgccacgcttcttgcgtgctcgcggctttccttcggctttacgaccgtagcgccgcacactttttgaatgaagctgaagcgcatgtcggcaatggcggcggcgcggtcgagcccgcgttccttttccatctgcgtgatgatgtgctccagtgtctccttttcattctggtcgaggttcagccggtctaaaacgagctgatcgccctcggcgagcttgctcgccgcaaagcgtaccgggatgcccgcatcgtgggcatggtcttcaatgaggctcataatgccgtgcaaacagcggtgtaccgcgccgttgtggtcgttcacatcgcagaagtcctgccgtcccggcgcttcccggtactttgccacgtgcacggcgtggtcgataagctcctcaataccctcgtttttcgcggcggagatcggcaccacggggatgccgagcatctcctccatctcgttcacgcgcacagagccgccgttttggcgcacctcgtccatcatattgagcgccagcaccatcggcacatccagttccatcagctgcatcgtcagatacaaattgcgttctatgttcgtcgcgtccacaatgttgatgatgccgcgcggatgctcatccaaaacgaagcgccgcgtgacgagctcctcgctcgagtatggcgacatggagtaaatgcccggcaggtcggtgacgagcgtgttttccacgccgcgtatcgcaccgtctttgcggtccaccgtcacgcccggaaagttgcccacgtgctggttagagcccgtcagctgattaaacagcgtcgttttgccgcagttctgattgcccgcaagtgcaaaggtcagcgtttctccgggcggcagcggctcgccggtctgcacgtggtacttgccgccctcgccgagacccgggtggaaaatcgggcgtgcgtcctgcggccgcatcggctccgttatcgtgtcgcgaattttatcgatctctattttttccgcatcggcaaggcgcagcgtcagctcgtagccatgtatgcgcacctcaacggggtcgcccataggtgcgaatttcaccatggtgacgtccgccttcggaatgagccccatatccagaaaatgttggcgcagcgcgccctcgccgccaacgcttgtcaccgttgccgttttgccgatcggcaggtctttcagtgtcatgttcttgccccttttctatcccgattagacgttttaagtctattatgttgctcggaatttgtcaagggcatttctacgcaaaagcacgcttatatctgcgtttagccccagataaagcgtgcttttacactctgtttcgctgttattcgcccagttttgcgctatggattgttgcggtcatttctttgtgccacagcttttcgcgccacatgcccacaaactgcgggccgcagaaattactcgtcattctcgacccgcacattgaaaaaagagttttgtcaaaagacaaaactcttttttggtgggccacaacatttgatagacaaaaagaagtcccttcttttctattttttccgctttcaattttgcttaacagcgcatcggtgatttcaacttcatcgtcgccggtagtgaacgtgatcgtgaatttatcgtcatataagaatatcttattgacaaatagttttatcaacgtccgtcgatatgtattgtccttgatatcgccttttgaaagtgctgttaatctctgcacaacttgttctttcgttaaaacgtaatgacgtgatttttcgatttcaatctggcgttcaagctctttgatttccgccgccagcttttctaaatctatgataaacattttccgcacttcatcactcgaacactggcggagagccgtcatttggttttctttctcccgttcagcggtttttaattccccttctaaccttttctgctcggatacatcgtcattttgtgctgagatttttacgacctcattcgctatcctattgatattcttcggggtaagtaactttttgcattcttccacaaccacatcctctatgtagtttttcataatcattttctttttgcatggctttctggcacccgaatttttacacttgtagtagttgtaaatcaccccttttgtactgatttggtttgagctatgtccgatcatcatagacttacagtacccgcaatataacttagtggtcagaagatattcggcctttgctctcgcccgcgccggagcctgtttattcagcttcattttatcctgaactttttcaaataacgcatcatcgataattctcggcatcccgcctgccacttcaatatctttgtatttgtaaatgcccaagtatttccggtttttcagcagcacgtgcaaagaggatttattgaactgtgctccctttgccgtttttatatgccgttcgttcaaattgtcgcagatttgttttgcgctccatcctcccgcatatttcgtataaatttctttcacgatgggagccttctgcggatcaagaacatatttatgattttgaattctatatcctaacggtgtagtccctccgttggataagcacttctccgcattgacgtccattcctcgttttaccttttgggtcaaatcatcggaataaaactgatctatacaaatttttaccagattggcaaagctgccatacggagaatcgtcatatttttctgtggcggagcgaacagagacacccaactcggtcaatttgtttatattattcaatacttggcgtacctgtcttccgaaacggtcagacgagtagataataaccgtgtcaaactgcttcttctccgcatctttcagcattttttgaaactggtatcgatcatcacttctgcctgttttagctctgtccgcgtattcatgaattacggagaatccgtttgcctgcgcatattcatggcaaactttcagctgtccctctatactttcttctctctgcttgctatcactgtacctcgcataaataaccgctaacatcaaatattgacctccttgttttttagtgcgtccaacaatttgttaaaaatcagttggttcggataatatctgtaatcggcaaatacggatattccgtttttctcgtaatattctattattgccgccgcacaagcagcactgcggctttgaccgtattcacattggcagattatatcgaagccgtcatcatgagccttttgtataaacgccgcaagactatccgcttccgggaaatacgtatcaaacgacaaaccaaaatcttccaatgtttccatatcaatatcatgaacttccacttgaaaaacccgttccggcaagcctttataatcgaccggttccgaaatctccccggttcgaatattcggcgggtcgtaaaagctgatgaccgctgttttctccgggaaccctttgctgatcaacttttcaatttcttctctcgaataaatactaaccttcatgatttgcctcctcgatgattttgagatacttgtatacggttggataagataattcgcaaagccgcgacaaatctttctttgtcaactgcccttgtttatattttggataatgcctgtaaaaggcgctcggtatgtcgtccgcctttacacttggtctgccgaccgttttacctttcgctttggcattttccattccgcttttcacgcgctggctgatgatatttcgttctatctcgctgaaaacgcccatcattttaagcattccttctgtcattgggtcaagctctttgctgcagtctacaacaaagctgccgagcaccaatttcagttttttctctttcgcaaactcgatgatctcacaaagctgttttgtactgcgtgtaattctgctgacttccgtcgcaatgatcgtatcaccaaccgttacggttttaagcagcttattcagttccgcgcgatctgtctttgcgccgctttcatattccagataaatcgtttcatccgttgcgccttgttgtttaagctctctgacctgccggttaatatcctgaagcttttcatttgtagagcaccgcgcataaccataaatcattgcaagaacctcttttctttcggtctgatattattataagacagtattttgccaaattcaaatccgttaataattcgttaatatttagcaattttataagcggaaaggccaacccaatttactttataaaaaacaaccgtaatccctaaggactacggctgtttatcagactatttgattataaacgaaaagagatgtttggggttatatccatagagtacaagtaaaacgattatcgacaatgtgaacaataaggtgccagagtacaaccgacacaaccatcccttgcgcctaatcttgccctcttgcatccactactcaaataataatctttcttaccatcattattgttggaattgttgttggtgcttccacctttagatgcagccaaaagcacacttgtcgctaaaagacctgcaccgatttttaagccctttttcacactttcaccgctttccttatccatgaacgagaataacccttttttctttttgggttcttccgaagcgttctgaccctgcgccatattggagtttgccggtaccattcccggaaaatcactctcggtataaacgatctttgtaaaatccgggtagatgaaataatcgaatatcttctgtacttcatctgttaggccaaacttttcttctatggttttataaatcgcagccgcattcggttttttcaaaatacaatcaaacagaacatccgcaactttttcctgcggaaaattcgggttatgaacactttcaagaactgcgtttatgtcatcgatcttaccactgtcggcaagccaaatatccttgccgttttctcgtaaaatccccaccaaagtaatgactgcgttccaataatcctgaaatacattgtggagcagaaggtgtgtgcgaattcgctgataaagttccgctttttgcggcgctgtaatttccgaaccttcaagcgtactttccaccgcgccttgtacaagcccccgtgcgaagcttccccggttactaaacagcgaaccgatgccgtttttgagattctgcgtaactttggcattgttttgttccgttaatttaacactttcatttgttgtacgcaaatcattcaaggccgtgtgaaaggtttcaatattctttgcgctaaaagtatcgatggagaactgataaataccttcagacacaagaatatcaaccgctttgctgctgacgattttcaaattttccagataaatgtcttggaataaagctctgaatgtgtcgaggtcatggattttttctttatactcctcggccgctttatccgcacatgctttggcaagtttcatgaatttggtgcgatatgtaataaaggcatcaaatcttgccgggatcaccaactctttaccatttaaagtaaagactttttcactgcctgtataagcggtgaaagcttcttccataatgtttcccattgtttcaaacctccgcttttttacattttatttttacaacacacctgtcacagtgcggattattcttcgtgcatatttctccatagtttttggcacaatatgcccagagaatataatccacctccgctgccggtctgtttaactgccttgcaatagccgccacaatgtctatcgcttcataggcaggtgcattttcgtgctcggaacaatctaaaatattcctgcctaaaatacgacggatatgcctatccggctttgctatatcataaccaacatttttcagatactccgttatgagcgcttcgccgaattgaatgaacttatgtgggcttttcggtgacgacagttctttcacgagtgtcttctgcgtttcatctttaaccaaaattttcatatagaagctatcaatgctgccatattgccgttcaagcgaaagaagtttgctgacattttccgttatcagtgcattcatttgttttttggtgtacggagaaccgagtttataagatagaattttatctgaaatttcttctggatcacaactgagaagtttttctgtatcatattggcaaaataaatcgtcaatagccgatatttcgccggtatttatatcgatatacggctctaatctgctccactgtgcgccgaaggacaacaacgaatacaccattgcacgaatatggtcgccgaccgagaatttatcgcccgcatctcttttatccagttgatgtttgatgaatgtgttctcccaaagctttttcccttgaacttctccattaactacaaaaagctggtttttcaactgtttatccatgagaagaacaaattccgctgctctttcaatattcttcatattcctctccccgtgcactactctttatccacttcaataaatatttcaggacttacattcagggcgagacaaattgcgcgcaggtcatcggcgtacatggttttttctccattcatcatggcatcaaagtccacttggggtatgcctgctttttgtgcgaccgcgaattgcccgcagccgcttccttctatgtaagctcgcacttttttgtaaacttccatatttacgcctccgcaaatacagtattactgtacttgtatttataatatcacagtatttctgtgaagtcagcgtataagtacagaatttcttgatttcatccttgcaatttatttattttcgcgtataatgttcatagaatgaggtgaattccgtgaaatatgaaattggcggcaggatacgtttatatcgcaagcaaagcggcttaacgcaagagcaattagccagtaaaataaatgtaaccaaaagtcgtgtatccaactgggaacaaggcatcaaccgccccgacgcggatattcttgccgacatttgccgcgctttgaatgtttcaccaagcgacctgcttgacgttcatttatccactgatgaattgaccgaccatgaacgaaaggtcattcgggcatatcgctcaaagcctgaaatacagcaggctgttaatatcttactgggcgtggaaggagaataaccctttcagaacaaggcgctacaccgccaagatcaaatgtgctcatgtctcccctatctttttacctacgcatactcccttgccttatccggtataaaagccggttatctcaatagccgcaccttatatattattgagataacaaacggaaggaggatattcgcatgaagatacgcaaaagaccgattactgcggctgatgatctgtctgtgaaccgttgtacgtttaccccggaagatgttgccgcttttctttcgcaaatctatgagcttcaaggtcttggaatttctctcaatgagaatgcagatggatgcgccgaatttacgattggcgactctgtttataacatcgctaacctctaacctgaaagcttactgtacagaaaaagccattgaaccccgattttggattcaatggcttttgttatacaatatattccttaatagaatttatttggaaataataccgtcattatctccacatctccattaaaactccacttcctcatcttggtcttctttatcttcctgaatatatggaggtaattgagatattttttcgttttctatcgtaatgagacttcccttcgcagtcgatttgatggtaaaattaatcccgacgttctttaggttactatgtaattcattgagcttgcgtgacaacgcattggctgccggcggaaccgcccttgttcctaagccggtttcatcggctgccgtacgcaaatagttccataactctgaaactaagcccttccattctcttttgttttccataaagtcgatcatcaaggtggctacgctgtccgaactgatcaactcataattgctcttttcgcgattcgcattgtactctgaaaggaatttctccccctgaccgcctaaggcttctccgattgcatacccccaacggcaaaagtcggccattcgaggcaattttctcaaatgaacatctgggtaaatgcgcatcgctttcgagagcacgtcgaacactccgccgagaatatccggcaggtcttcttcaaattcctgttcaagttccgttagctctcgcctatcttcttcatcgacacgagacagctctaaaagaatggaacgatctaataaatcagagctgtttgccacattattgattccgttaatagccagacatctcttgaacaagaagaaatggctttcatcgtccgtatacaattttctggattgaactgcttcacccgttatggctctgcaaaataaatcgctcgtatcttggttgattttagaaagattatcgaacggcaaaaaccagtgttcctgcaagcctattaactttgacggcatatctttatgtaaagatagagtttttacgatcgacgggtcgatggctttcttcaaaaaagtacaagccgtcgtcttcgcagcgcccttttcgccaaaaacgattattgcgctatgtacgatgtctggtacaaagcagctgacaaaccaacacaaaaacagggttttctggttcttgatgttgatgtatttcaagattttctgaatatctccgtttttgcgcggcaaacactgctctttttgatggttatatcgatcgaatagtattttatcttcctctctgatctcccacccttcttctgtaatttttacaaatttccaatcttccgttctcaaatcataccaaaaggcattctctgcttttccgactcggttatagagcttcacctttttgctattttcaaaaagcgttttgccttttaagtataaagccacttgtttcgtgttctccgattttagtccactttgtgtcttttcacgatacacataggatgcatacgtgttaaattctccgctctcgattttcataaccttcaaatgcttattttgtctaagcgcaatgtacggctcattattttcgctgttgataaacagtgttgcaccttgctcttggagaatttccagtaaagtattttcttgtgttttatttttacccgattttcttttttggggttccgatttcaattctgtgctttcatcctgttccaaaatatccaaataaggcaaatcatccacttcctccatagagtgtcccgctttcagccagtcgtatacatcgcctttaggcggcaagccgggcagacaaacaatttttgcattcggaatattctccacaattttcttcgcgtatttcattccgggtttatcattatccggaagaatgacgacctctttacccatgaagtaatcctgatattccgaaagccattttgacccggaaccgcagttaagcgtggttgcaactcttcctgcctgaataaccgcgtccgcacacttttctccttcgacgaagtagaccttctgagcacgaatgacctccggcaaattgtacggaaccggctttttatcgccaagtcccttttccccgttcgggcgtacaaaagaaaaactctttttcccatccgctttatcgaaacgatttttggtataagcgatagaaccatccgcattgtaataagtatagaccgttttgctcatagtatttgtttcattcctttcatcattgtcatacatatcttttagttttagccccacgttattcagaatatcttccgctttgcacccggcaaagcagttgagtaaaatctgttttctgtcttttgaaagtccaatagacaagctggggctatgatcgtcgtgcgcagggcaaattgccatgtactgattttcagatacctgctttacaccctgaaattttaatagtaaatcttgaattttcattttttactcttcctttcatttgatttagtttttggaggtgttttcacggctgcttgtgtttttcacctccttcgtttcgtctttctgctttctttttgcactttcgatttctcgtgatagtacatcaaagcattcgattgcaaattctcttgcgagtttcgttgaaattgtgaagtcagtcatcttgacaaccctccaaaaattttttgttttgtgctgcctataactgatattcacaattaaattcacttgacggaactaaacgggtatagtattctattaaataagaaagggatgtttatggaactaaatttaagcatgaatacatctgattacgaatgcagagaatatctggcttccatacgatggaaaaacgggtttacgtgtccgcgctgcggttgtgctgaagcttgggaaacgaaagaggtcaaatataaatgtaagaaatgcggatataaaatgtctgttaccgccgggacgatttttcaagattcacacacgccgttagagaaatggtttgccgccatagatttgataaacgcatcaaacggaataatcacggcaagttttctccaaaacaaattaaaattgggcagtaaccgcaccgcccaaagaatgacacattttattaaaagagctcttgtaagaacacaaatcagaaaatacagaagagcacccgcagagatgttaaacttgcccgtagaaatcgatgtcattccgatcgtcattacgcgcgagcactttttcgtaattaccgctgttgaaaagcttggcaatcgtaccggccgtattcagatcaaacaaaccgataacagtccgcaggaatttgcagattttatccgaaatacgattaaagtaaacacttctcaaaatgggcaaaagaaaatcggtattatttgccccaagattttgccaagtgaaatacgtgaagaatataatcaactaataaagaattcacgttatgcctataacgcttctaaaaacgtgtcttcaaaattcaagaaatatataagtgaacgttatcatggaaacttcgacgtctgctgcaaaaatttttgtattacgcaaaacgcaagatttacttctgtttcttttgaagaaattctcgaaatcatgttaaaaaaaggcggcactgccatacagacagtaccgcctaggcgttcatatttacatttcattgcaaagatttgcaaaagccaaagcccccaagaaagaagatctcttgagggctttgtttaatattgctctggtgggccatcagggactcgaaccttggaccaaccggttatgagccggtagctctaaccaactgagctaatggcccgactatatatcggaacttagaaagtatagcacaaacagcatataattgcaagacctaaattcacccgtgcgaaaagaaaaaggagagccgcaaaatgactctcccgttctttacaggtttataggacccgaaaattattccttattgcagtcgcagttttcgccgcaatcgcaggaatcgtcttcttcgaggtcgaactccagcgtttcgccgcagttcgggcaatcgatggagccctcatcgagcatttcttcgttgagctcgatggtatctccgcacttcgggcaggtgacttcgtaatagcattcgtcttcgtcgtcttcccatgcgtcgtcatcatcatcgtcttcgtcctcgtcgatgtcgtagaactcttcttccagctcgccgaggtcttcgtcgatctcgtctacctggccgctgagctcatcgtatgcgtcttccatttcctcaacggaaagggagaggtcatcgagcaggtcaacgatcgcgttgaagagcttcgtctccttcgcattcgggtccagatccatgccttccatcaaaccgcggatgtatgccgctttctcggaatttgtcatgcttgcacctatctttccggcaggcaaacgcgctgcctaatgtagggctttcgccccgggtgtttcggcgtatggaacaaggaaaaacgcttatgcgcgctccatgtactcgccggttctggtatcgacgcggatcatttcgccttcgttgatgaagatcggaaccttgatctctgcgccggtctccagcgtagcgggcttcgtgacgttcgtagcggtatcgcccttcacgcccggctcggtctccgtaacctgaagctcaacaaagttcggcggctcaatgccaaaaacgttgcccttgtaggagagcaccttgcaaaccatgttttccttcacaaagcggaagttgtcgccgaggacattcgggctgatcggcagctgctcataggtctcgctgtccatgaaatagtacaggtcgccgtcattgtagagatactccatgtcctttctctcaatgaaagcggtcggatacttatcgttcgggttgaacgtcttttccgtcacggcaccggaaatcacgttgcggatcttggtgcggacgaacgccgcgcccttaccgggcttgacgtgctggaattcaatgatcgagtaaacgttgccgtccatttcaaaggtgacgccgtttctgaaatcgcctgcggttaccatatagataatacctccaaatttttcttaggtctattgtataacagaaagtggcttttttcaagaaaaaaccgttctgtttctccgttttttcggaaattttacaggatgatgagctccttcggggaatgcgtgaggctgcggcagccgtcatctgtgatgagcagcatgtcttcaatgcgcacgccgcacttgcccgggatgtagatgcccggctcgtcggtgatgaccatgcccggctcacagatggtctcatcggtcttattgaagcgcggccactcgtgaatctcgaagcctacgccgtggccgaggccgtgaccgaacgtgttcgggtacggggtctcgatgatgtcgcgcgcgatcttatccacatcgcagcagcgcatgcccgggcgtgcgccgtcgataacggcgagctgtgcttttaaaaccgtgttgtagatggctctctgctcatcgtttacatagccgagcgcgacggtacgggtcatatcggaatgatagcccgcgagcatagcgccggtatccatggtgatgagatcgccttttttgatctgtgtgttgcccggaatgccgtggcactgcgagccgtttgcgccggtgacaacgatggggttgaacgcattgccgtctgcacccgctttgcgcatgaagaactcaatctccagcgcaatttcgcgctccgttacgccttccttgatataggggaggatgtgctcaaacgtagcgtctgtgatggcctgtgcgtcacagattctcttcacttcctcatcgctcttgacgatgcgctgcttgcggatggcatcgtccaaggtcgtattcaaaatcgccttagcgccgcactcttcggagagctgctcaaaacgcttcgcatgaccgtagggaagagtggcgtattccatgtacacctcggtgatgccgtgctttttcagaagcgtcttataggtttcgttaagcgaggtgaactccacaacctccacattttgcgccttggcgcgtgcggcctcggtgtaacggaaatcgaggagataataagcctgctcggaagtgagcagcagtgcgccgtctgtggacgggaacgccgtgaggtaatagaggttcgtttcggaaacgatcagcgccgcttttttgctatcgccgccgatgacagaattggtaagacgttcgatcggattgctcattgataattcccctttctaatgtgtacccaaaggtgccctttatgctttgctttttaccgtttcttccccggccgtgagccgcgtatagtgcgggcgcaaaaagccttccagactgcgcttgaagcgcaccgtggcggaaggatccggcgacagggggtcaagtaaaaccgaccgcattccgcaaaggtttgcgccgaggatatcggtgaagatctggtcacccacgacaaggcattccctgcggggcgtgccggccattttctttgcgcgcaggtagccgaccggaaacggcttgcacgcgaaagaaacgaacggcagattgaactgcgcggcaaagggcgccacacgttttttgtaattgttggaaacaacgatcagcttgacgccgcttgccgttacgctttgtgcccacgcccgcacgccgggaaacggcgtctgcgagccgtgcggcgacatggtattatccacatcgagcacgatcatgtgcacattgagcgcttttaaaagctcgggcgtaagctccgtcacgcagtggagcgtgccggtcggtttaaataccgccatagcttcggtctttgcctcctgtgttgttcgggaaaaacccgtttacacaaaaaagcgggcaaaaagcccgcttcttcacgtttgattatttgtacttgcgcttgcgagctgcttcggacttcttcttgcgcttaacggaaggcttttcgtaagcctctctcttgcgaacttcctgaataacgcccgctcttgcgcactgcttcttaaagcgtctgagtgcgctctccaaagattcgttgtctttgattctgatttcagccatctatatccctcccatccgccatcaggcaggggtttgtatttgttacttagcacgaaataacacaaataattatagtggcagggggcaaaaaagtcaaggcttttttcccgaaaaatagaagaaatccgtttctctttgcaaaaaaatccgtttagagccgtttatttgccttttaaagcggtgctgcacgagtttttggggcttcttttcccctgctttgcaacttttatgattagatggaaaacgcagcgcggctttgcggctttgtcataggttttttcttgtttttgcttttcggcaatctgcaaaaatgctgataggaaaatttttcaactgaattttgcccaaaacattgacaagcgcgagcgttatattatataatacctccataaaaccctgcgcaaattcctactaaagcgaggttacggatttatatgaaaaagacggcgcttacaaaaagcgaaagcgaagtcatgtatcttttgtggcacacggaccgtgcgctttccgcggcggaaatggtcgcgctttccccacagaagacctggaaggacagctacattcacctgatggtgaactctcttttaaaaaaagggatgatcaccccggccggctttgtgaaaacgtttcgcaattatgcgcgcacctttgcaccgtgcatgacagaggaggagtatgcccagttacagctgcgcgacaaaacgattcaggatcccgcgctcgtggcgccgttcctctctgcgatgattgacacggcagatgacccggcttcgatgattgacgagctcattgcaatgctgcataagaagcgcgaaaaattagccgcgaaaaaacaaacatgacggacataacgaaaggcaggctgcgtaagtctgcctttttgtcgtattgtaaggatatattcgctgtgaaaccgcccgaggagcaataccacgcgccgcaagacgagttataattggtctttgcccacgggggtgcagaaaagcttttcaaattcctcgcgggtctcggaataggccagcgcccacatcattttggcgatgacggcttccgttgtcatgttggaagcttcgagcacgcggtatttttccttgatgatatggcccacgcggtagacggaaaggttgctgccctcgtgcggaacctgcgtggtgatgacgacgcgtacgccgttttccattaacgcagcaatcttttcctcaaacgcgttgtcgccgtagtacgggatgccgccgacgccaaagctttcgatgacaacgccgcggcagtgcgcggtgatgtaatcgaacacggacgggtccatgcccgggatgacgcggatggagaggatctccggtactaatttatcgtagaacaccgcgccggggcactccgggcgctcatcaatatagcacaggagctttttatcgtagaacacgccgatgtccgggaaatcaatgctggaaaaggcgtcaaagctctttgtatgcgtttttctggcgcgggtgcctgcaatgacgtgcccgttaaaaacgacgtgtgtgccgcacgcacgggcatctgtggcgtatacaaacgcttcaaacaaattgcgccgcgcgtcgccgtccggcacctcgatggatttctgcgcacccgttaaaacaacgggcttttcgtttttctggataagatacgagagcgtggccgccgcgtaggacagcgtatccgtgccgtgggcgatgacaaagccgtcgtactttgcatagctatcgcggataatctccgccacgtggatccactgcttccaacacatattggtactgtctaagctgtacggctgcacggtatccactgcgcacaggtttttcacctgcggtacggcatttaaaagttcctccgatgtaatcgccggcgtgaggccgttttccgttttcgccgaagcgatggttccgccggtcgcaatgaacagaatttttttcattctgcattttcccctattcttcgtgaaattgcggaaatatcataccacattttcctgcataaatgcaagccgcagaaccgacaaaaagagacgagccgcagcccgcctctttgcttttgcgaaattatttgagtgagatgttggacgcaagggacaaaagtgcatcgcccgtcaggcggtacgttgtccactcctccatgcgcacggcgccgagggaatcatagaacttgcggcttggggtgttccaatcgaggcacgcccactccagtctgccgcagccgcgctgcaaagtgagccgcgcaaggcgctttaacagcagcttgccgtagcccttgccgcgatattccggcagcacgaaaagatcctcaagataaatgcccgcgcggccaagccacgtggagaaattgtggaagaaaagcgcaaagcccacgggcttttcgtcctccgaaacaagaaaaacctctgcttttttcttttggaagacccactcttttaaaagctccggcgttacaatgacctgatcttccatattttcatacgcggcgagcgcatgaataaactctaaaatgaccggaatgtctgcttcggttgcaaagcgaatgttggctgccatggtttcccccttattctttcggctttctgttgcggacaatgagcatgaagcggtgctgcacgcttgggatatagccttgcttttcacacagcgcgtcgagcgcatcgagctgcggcaagcagctttctactgtgaaattgccgaactcccacggcagaaccttagcgtaccacacgagtgcgccgacatccaaatagtggtcggttacataggcttggtcgcagaaattcaccgtaaagccggcgtttttgaagcgcagcagctcgttttcgaggttaaagctcggcatggcggttttgttattgccgagcaaagcgcgcaggcgcaagttgttgctgccgcctacctgctgcgtgatgaaatatccgccgggctttaggacgcggcgcacttcgtttacgtcataagaatcgtgacgatttaaaacgaggtcaaagctgttatccgcaaacggcagaggtttgtcctcttcggttttgcgcacggtgatgccgagcggcgctaactttttttcgcacagctcaaaattcggctgccagctttccgtgacgcttgtctgcgaaaacgggtggcgcagggacaaaaggaactctccgccgcccgtacccatatccaaaatgacggactgcggctttaaaaaatcgagcaccttttgcttataatcccacggcagcggggcttcctctacacgcccgcggatgtgcgaaaaatcccagccgtgcatttcggcgctttgctcttcctgcgtccaaagtgcgtgtttttcagtttgtgtcatgtattgtggtccaccttgtggaaagttttgaggttacccgttttgccgtgacgacggttaagctccgcgcgcacatcgtcaagcgggatgttctcgttcaccatcatgacggtgaggtgatagagaaggtcgctgatttcgcccacggtgtcctcttttttgccgtttttcgcggcgatgatgacttcgctgcactcttcgccgcactttttgaggatcttatcaagcccctgctcgaagagatagcaggtgtaggagccctcctgcttttcgtccttgcgctccaaaacggtatcataaagctgctgcaaaatgtccatagtgttccctccgtcagtttcttgcaatctctttgtagaagcagctgtggctgccggtgtggcacgccgcgcctgtctgcacgacctttacgagcagtgtatcgtcgtcgcagtcggcatacatactgatgaccttctgcgtatggccgctcgttgcgcccttgttccacagcgtttggcggctgcggctgtaaaaccacgtgtagcccgtctccagcgttttcgccatggattcgcggttcatgtatgccagcatgagcacttcgtttgtggaggcctcctgcacgatgcacgggatgagctccgatttcttgaagtagcgctcaagatggtcttcctcttcttcgctgcacttgaacgatttgccggaaaggcgctgactggcggtgatggccgccgttaagtccaacgctttcgtataaatggatttgcccgcaatcgcaccgtacacgccgagggcgttgaggtctacgatgtcctttaagttgccgacgccgccgcttgcgatgatgttgcagctgacggcgcggttgaccttatcgagcatgacgaggttcgggccgttcatggtgccgtctttataaatatcggtcacgatgaggtagcgcacgccgatgtcttccatgcgctttgccatttcgaggtaatccacttcgctttgagccgtccagccctctgccgccaccttgccctttaacgcatcaatgccgacggcgatctttttgccgtattttttcacggcctcgcgcacgaactccgggctgtgcagcgccgcagagcccagaatgatgcgattgatgccgtgcgaaagataatattccacggtgtccatatcgcggataccgccgccgacttctatattcatcgagacattatcgcgaatggagaaaacggtgctgtcgtttacggggcggcgtgcctttgcgccatcaagatcgacaaggtgcacccagcgcgcgccctgctcctcaaacgattgcgcggtcttgacggggtcttccgccacctgctccgccgtggcgtaatcgccttggaacaggcggacgcatttgccgtccttgaggtcaatcgccggtaaaatgatcatgttatatcccttccttattcattccaaattatcgtgtatgcaaaaaagttaaaatttcaaattattccgaaagcgtgcccttggtggaaagcaccgcgccggtgctgttttctgctgtggcatcgcacagagcgtgcgcgcaggctttgaacagcgcttcgatcatatggtgagaatttttgccgtaggggcagcgcaggtgcagcgtgaagccggcgttatcgctaagcgcgcggaagaactcctccgtcatgcaggtgtcaaaatcgccgacgcgctcctgcgggaacgcagcgtcgaacacaaggtacgggcggccgctgacatctacggcgcagaagccgagcgcttcatccatagggatcatggcatggccgtagcgcacgatgccgctgcggtcgccgagcgcctgcttaaacgcacggccgagcacgatgccggtatcttccaccgtgtggtggcaatcgacattccagtcgccctcggcttttaaccgaaggccgaagccgccatgcacggcaagcgccgtgagcatgtggtcgaaaaagcccacgccggtatcgacgacaacctcgccgccgtcaagccccaaggtcagctcaatgttcgtttcttttgtttggcgcacaactgttgccgcacgttccatatcgtttccccctaaaagggcctaaagcccgatttacgcttgctctttttcttcaaagaaccgctgaatgtgctctgtgaccactgcgttttcgcccgtggagcctgccgtgatgcgcagggcggacatgtttttaaagtaccgcaccgcgatggattcggccaaaaggcgctcgtagagctcctttgcgtacggtgtgcgcagaacgacgaagttcgtaacgctctttaccgtttggagcttttccgggaagcgctgcgccatgcggtcgaatttctgctgcaattcgtctcgcgaaagcagcaatctgcggatggcggcatcggcttccgcgcggtttttcagcacggcttccgccattttctgcgagcaggtgttgacgttatacggcgactttacagccttgatggcgcggacaagcttttcgttgcccacggcaaagcctacgcgcagcgcggcgagaccgaaggctttggagcacgttttcaagatgagtaaattatcgtagttttcaaattcgccgagcatagattcgttccagaagtccatataggcttcgtcgagcacgacgagcgcggagacgcccctgatgattttgcgcacggcttcgcgcgtgaggccgacggacgtcggattgcacgggttgctgaaaatgagcaactttacgttctcattgttgcaggtttcgatcaccttgtcaatatcgattgtgaaattttcgtcttttttgatttcgatgccgcggcattccgaaacgtagccgtaaaaatcatacatggaaaaatccggcgtgagcgtcgcgtaggtctcgcccttcatcagaaagctctggaaaatgacgttgatgagctcatcgctgccgttgcccgccgcaacgcacgccggctttaccttatagcttttggcaaaggcggcgcacaggtcttttgcggtgggatccggatagcggttgagttccaccctcatcatggcgtgcaaagcggacgccataacggattccggcaggcacaggaacgattcgtttgcgtccagacgaattttatactcgcccgcaatgggtttatacggctctaaatcgcggatcttttcattcagcgtatacataaactacctccggggtcactttttcttgcggacggcgatggaattcgcgtgcgcggtcagctcttcggtctcggcaatgcggatgatgtcgtcggcagctttcagaagctccgcttccgtatagtagataaagctcgattttttgataaaatcatcgacggaaagcggcgagaagaaacgcgccgtgccgctggtgggcagcacgtggtttggacccgcgaagtaatcgccgagcggctccggagaatagtttccgaggaacacggaaccggcgttatcgagcttgccgatgtattcgagcggattttcgcagcagacttcaaggtgctccggggcgagctcgtttgcgaaatcgacggcttccgccatgttttcgcagacaataattgcaccgaaattttcgatggattctttaatgatgtcttttcttgaaagcgtctgcatttggcgctcaatctccgcagcggtcgcctttgcaaggtcttcctccggggtaatgagaatggcggacgccatgcggtcgtgctccgcctggctcatgaggtcggcggccaagaactccggcttcgcggttttatccgcaatgacgagaatttcgcttggaccggcaatcatgtcgatatcgatagtgccgtacagtaatttctttgccgtggcgacgaaaatgttgccggggccgacgactttatcaaccttcggaacggtctcggtgccgtaggcgagcgccgcgacggcctgcgcgccgccgatgaggaacacgcgatctacgccggcaatcctcgcggcggccaaaatgtttttatccggcttgccggtacgtcccggcggcgtgaccatgacaatctcgccgacttcggcaattttcgccgggatgacgttcatcaaaacggaggacgggtacgctgccgtaccgcccggcacatacacaccgaccctgtgcaggccgcgcacgcgctgacccatcagaacacccgtgggcgaggggtcgatgcggctttgctgcttttgtctggcgtggaacgcgcggatattttctgcggcgcgctccatcgaagcgatgaacgccgggtcgcagtctgcggtgagcgcatcgatctcctcttttgtgatttccgctttctccggcgcccagccgtcgaacttcatcgtatagcgtcgcacggcttcgtcgccgttatcgcgcacgtccttcaaaatttcggccactttatcctctacgctgcggtcgttttcgctgacgcgggctttaaggctttgaataaacgcttcacagtaggctctatcgcctttggcaatacggatcatacggatttctcctccctgttcttttcaatctgcgcttccatgcgggcggcaagcgcttcaatctcctgctttctcattttaaggctggcggtgtttgcgatgagacgcgccgagataccggcgatggtctccgtgacctccagaccgttttcttttaaggtagtgccggtctcgacgatatcgacgatgccgtctgcaaggccgagcagcggggcaagctctacggagccctcgattttgatgatgcgcacgtccatggcgcggctttcaaagaactgccgcgcgacgttcgggtatttggacgcgacggtcttcgctttgtagccgccgaagaaatccgtacccttgcggcaagcgagcgcaaagcggcagcggccgaagccaagatctaaaatttcgtaaaaatgactgccgttttccatgatggtatctttgccgacgacaccgaggtcgcacacgccgttttcgacgtaagtgatgacatcggcagctttggctaaaacgacttcgatctcgccgtttccaacgggaagaatcagtcttctgcctttttcgcgcacttgcgtgcaatcaaggccgatctgctctaaaagattcacggtgtctttttcgagacgcccttttgtgagggcaattcttaatggcttcatgcgttttcctcccctctaaggacgatgactttcgggatgccacggcgctttgcgtagcgctcggcctcgtctgccgtatcgaacacggagctttcgcagattttgccgtttgctgtcagctcgcgaattttcatctgggcttcgatctccgcgccgctttccgcgtggacgagcacatccggcgtgggcacgctttcaatccggccgtcgtcgagcaagacagaagccagtgcatcaacgtttgcggcaaagccgatggcgggcatgggggcatcaaattgctttaaaagcgtatcgtagcggccacccatcagaacggcgtcaccgtagttttccacataagcgctgaagacaacacctgtgtagtaatcattgcgctgcacaaggccaaaatcgaccatcaggcgatcatcgaggccgagcgacgacagcgcagtatatagcgtgcgcatataatcgagcgtttcggaaagcacgggatggcctttgcagaaccgctccgcttccgcgaagacctctgccccgccgaacaggcgcggcagctttttgatggcttcggtatacacggatttcgggagtgcgtcgagcatatcgccgagggcggcgtagtttttcgattcgatcgtctggcggatatcctcttttttatcggcggagacgggcagctcatcggcgagcgcaccgaagaactttgcgctgccgatctccaagcggaagttttccgtgcacgcggaaagcgcctcaacggcggcggcgatgacctcgatatccgctttcagccccgatgcacccaaaagctcgatgcccgcctgcgttgtttcgtcgctgcggccggaaagatccttgcggttgcggtagatcggctggttataatagagccgaatgggcttttccatcgtctgcaaccgcgttgcggtaaggcgcgcgatgggcagtgttaaatcgggacggaacacgatgagcctgcctttgttatccgtggatttatacatctcatactgaggaatggcggcgtttggggcatcgaacacgtcgtagtattccatgccgggcgtgatgacctcattatagccgcgcattttgaatatatgcgtgagccgctcgctcacggtacgctgcgaaaggcactcttcaaacagaatatccttggtgccctccggcgtgattttgttgaacttcttcataacgaccgtccttctgctttaatgtaatgacgtgttacaataatatcatgtaactgtgtgcttgtcaaggcttttcgcgttttgtgtatacacgtatatacgcatagatatgcagaaaggcggaagcaacttcttgcgtccgcctgatggcattaaaacagtgatgtctggctgctgtccggcagaccctgcagtgcgccggcgcttttcaaaacgtcgataacagcgctggaaaccttggcgcgggactgcacttcgtcgatggagatgaactcctcgctgcccgtgcacgcttcatacaagctgtgcgccgccgcctcgcccacaccgggcagggacgagaacggcagacggatcttgccgtcttcgacaaggaactttttcgcatcggatttatacaggtcgaccggcaaaagctcgatgccgcggcacagcatttcgttgataatctggaatgtggaatacgccgcgtcttccttgacagtggactggtgctccttttgcttctgctccagctcgcgcatacggcgctgtacggcggcacgcccctgcacggcggtggcgccgtcgaaatcttcactgcgcacggtaaagtacgccgcgtagtattccacgggataatgcaccttgtaccagccgaggcgcagcgtcgcgatcatgtaggcggcagcgtgcgctttcgggaacatgtacttaatcttatagcaggactcaatgtaccaatccggcacgttatgctccttcatggcggcgatgtgctcctgcgtgaagagctttttcgcgttgcccttacgggtgatttccataatcttaaacgccattttcggctcaaggccctttaagagcaggtaggtcatgatgctgtctcgcgtaccgatgacggtggcgatggtgcaggtgccgtctttgatgaggtcctgcgcgttgccgatccaaacatccgtgccgtgggacagacccgagacctgcagaaggtcggagaatgtctttggctgggcatcgatgagcatttggcgcacgaacggcgtgccgcactccggcagagagaacgtgcccgttaaagagccgatgtcctccggcgtgacgccgagcgcttccgtggacgtaaacagcgacatgaccgccgggtcgctcatggagaccttcatgacgggaatgccggtgtaatcttcgagatagcgatagatggtcggcacatcgtggccgagctcgtccagtttacaaatggtatcgtgaatggaatggaagtcgaagtgcgtggtgatgttatcggaattctggtcgtttgcggggtgctgcaccgggcagaaatcatagacctctttgccctttggcacgacgaccatgccgcccgggtgctggcccgtggtgcgtttgatgcccgtgcaggaaatggaaaggcgtttttcctctgcgcgggaaagcacgcgggaacgttcttcggcatactttttcacatagccgaacgcggttttatccgcgacggttgcgatggtgccggccttgaagacgttttcgcggccgaacagcgtctccgtatagcggtgcgcaccgctttggtattcgccggagaagttgaggtcgatatccggcgttttgtcgccgtcaaagccgaggaacgtctcgaatgggatggtgtggccgtcgcggtcgagatcttcgccgcagcgcgggcactttttcggcggcagatcaaagccggaaaggtagctgccgtccgtgatgaactcgctgtatttgcacttggggcaaatgtagtgcggctccaaggggttgacctccgagatgccggacatggtcgcgacgaacgacgagccgacggagccacgcgagccgacgagatagccgtgcgcttcgctgtctgccacgagcttttgcgccgtcatgtacaaaacggagaagccgtgcttgttgatggagccgagctcgcgctttaatcgcttttcgacgatctccggcagcggatcaccgtacttttccttggtacgtgcccacgtaatggagttcagttgctcctctgcgccgtcgatgaacggtgggaaaacaccctccgggatggggcggatttcctcgatcatatcggcgatcttgttcgtattggtgacgacaacctcatacgctttttctttaccgaggtagtcgaattctttcagcatttcgtccgtggtgcgcatgtagagcggcgcctgctcatcggcatccgtgaagccctgacccgccatcaaaatggcgcggcctgcggcgtccttcgggtctttgaagtgcacgtctcccgttgcgacaacgggctttttcagcttttcgccgagctttacgatggtgcggttgtactcttttaactgctcgatatcgcacgagccgttgcgcaccatgaacatgttattgccaagcggctggatttcgaggtaatcgtagtaggaagcaatctcgagtaatttttcccacggctcaccgcgcgtaatggcgcggaacagctcgcccgcttcgcacgcggagccgatgatgaggccctcgcggtactggttcaaaacgcttttcggcgtgcggggacgcttatagaagtaatttaggtggccaaacgagatgagcttatagagattctttaaacccaccaagttcttaacgagaatgatctggtggtaggtcggcagctttttcgggtcgccgcccgcgagtgcggtgttgatctgcttgacatctgtcagcttgaaatcatcgacgaggcgctggatgaggttgataaaaatctcgccgagcacggcggcatcgtcgcacgcgcgatggtgattaaagggctttagctttaaatacttcgcaaccgtatcgagcttgcaatttttgatgtccgtcagcatggagcgacacatggcgaccgtatcgatgtacacatacgggaacgtcatgtcgtggcggctgcacacggcgcgcaggaacgaggtatcaaaatttgcgttgtgcgcgacaagaatcacgtcttcgccgcagaactcgaagaatttgcgcacggcttcttcctctttcggtgcgcccgcgaccatttcatccgtgataccggtgagctccgtaatctttgcgggaatgggcttttcggggtcgacgaatgtattgaaagattcggtgatttcgccgttatgcacgcgtaccgcgccgatctccgtgatgcgttctttgctcgaagaaaggccggtggtctcgaggtcaaagcagatgtagtccgtatggagcggcttatcggtctcgccggtaacggcgggcacgaggtcgtttacaaagtagctttccacgccgtagataaccttgaattcgccgccgcccttcttgatcttgagccacgcgttcatggcgtccgggaacgcctgcgcgacgccgtgatcggtgatggcgagggccttttgcccccatttataggcgcggtcaataagctcgcctgcaggggtcatgccgtccatggcggacatgttcgtatgcaggtgcagctctacgcgcttttctttggcggtatcgacgacctccaccatttccgcgcggaaaatggtgttcgggcgcataacgttttcgcggtcgtatttatcgtactccacggagcccgtcacgagcagcgccgtaccctttttgatggcatcaatctttgagcagtcgttcgcctgctggataagcttcagcgtgatggaatttgtgtaatcggtaatgtcgatggaataaattttgcgggagccgtcacgcgtttcgcgggattcgatgtcgaacacctcgccccaaacggtgatacgtccggcttcgatggtcgcttcggaaatcggcaccggctcctttttcggcaggttgccgagaatggggcgcgcggtctccagaatgatctgcggcatgagcgatttgccctcgcgtacgctgacgcggcgcttcgcggctttctctttcatggcggcttcgtaacggtccatttcttcgatgacggcggcgcgcgcacgcttctcttcctcgacgtgcaatcgctcgatgacggattcgtcgccgttttgcagctctgttttgcccgtaaacgtcaccgtaacgggcacgctgaaccactcctgcaccgtttcgctgatggcgcggtcggtatggcgcttttcgagcagattgagtccgccgtgcagcagctctattgtaagggtattttcgtttatggtgcagtctgcgtctttaaatgtgccgtttaagcttgcgtcaagctcgcgcacgcgctccaaaacggaggtaacgcagctttcctgccacgcctgagcggggaatgcgggggcaagctccacgcgcatatcgggcagaatgcgctcgtgcagcataccgtttacctcgcgcaggtcgctgtacggcacgaaggcttcaaacttcgttttcaggcgcaccaaacggttttccctgtgtatctctattttttcgatctgaccggcagcgacgccgtctttcggcgtatagccggcgcttttcagcagatcgcctaatgttttcaagcgcatctctcctatgtagaatggtctgtgtttttatggtgtgagatgatgcaaaaaggccgtaccgcccggcacagcctgttttattgcaaattaaagcttgtcgatctcttccatcagggcgtccagaagctcagcttccggcaccttgcggatgatctgaccttttttgaaaatgaggccctctcccttgccgccggtaacgccgaggtcggcctcgcgcgcttcgccggggccgttgacaacacagcccatgacggcaacggtgatgtccttatcaacgtattcgagtgccttttcgaccttattggcaaggccgatgagatcgatacgtgttctgccgcaggtggggcaggaaacaagctttacgccgccgcgcagaccgagcgcgctcaaaatatcgcggccggtgcgaatctcctctgcggggtcggccgtcagggaaacgcgcagcgtatcgccgatgccgcgctgcaaaaggctgccgatgccgatggcggacttgacgatccccatgcgcagcgtgccggtttccgtcacgccgaggtgcagcgggtaatcgcagcgctccgcgatcctttcatacgccttgatattcgtatcgaccgaggaggatttcagagagatgacgatgtccgtgaaatcgaacttttcgagcaaagacgcgtggtaaagtgcgctttcgcacagcgcttccgctgtgggcgcgccgtactttgcgaggatgctcttttcgaccgaaccggaattgacgccgatgcgaatcgggattttcttttcgcggcacacggtcgcgacggcttttacgcggtcatcgccgccgatgttgccgggattgatgcggattttgtccacgcccgccgctgcagcttcaagcgcaagcttataatcgaaatgaatatccgccacgagcggaatggaaattttctctttgatggcggggatcagccgcacggcatccatatcggggatggcagcgcggagaatctggcagccggctttttccagtgcgaccgcctgccgcacgctgccttctatatcggtggagggcacgttcagcatggactgcacggtgacgggcgcgccgccgccgattttcacattgcccgccatgacctgttttgaaatacgtttcattgtatcgtcctttcccttatccgcctgttgcgatgcgcatgatgtcctggaacgtgacggcgagcatcaggcagatgagcagtgcaaagccgcctgcgtgcacccatcgttcgtactttgccggaaccggcctgcggaagatcgcttcgatgatgaggaacacaagccgtccgccgtcgagcgccggcagcggcagtaaattcacgatgccgaggttcacggagatcacaagcatgatgtacacgatgttgttgaccgccgcgccgaagctctgcttaagccccgcgcttgcggcctgcgtgactgcctgcgccgtaccgaccggacctgcgagctctttaaagccgaagcggcccgtcaccatgccgatgaggctgttgaagatcatgcgcacggtggagtacgtatccgcaaacgcgtttttgatgagcgtccacggcgttttttcttcgcccaacacgtagaaatccagcacggcgcggtactgcttgccgtccgcagatgttgtgttgatggtcaaatcgttaaaggtgacggtctcttcgccgcgctttacggtgaggtcaagcgccgcggtgccgtctgtggaatcaagcgccgccatacttaaagcaaaggaaagatcctgccctgtgcgaacggtgtagccgtcgatggaggtgatgacgtcgcccacctccacgccggcggcttcaaacgcagaattttccgcaaagccggcaatctgcatggtggcgtagcggtcttcctgtccgcagatgaccatcatcagcaaaacggcaagcaggatattcatgatgccgcccgccgcgaccacgatcatgcgctgccaaacgggacggttgccaaacgcgcggggatcgtcgcttttttcgtcctcaccctccatggcgcagtagccgccgatgggcaaaagccgcagggaatactgcgtttcaccgcgggtgaacgagaaaagctttggccccatgccgatggagaattcgttgacgcacacgtggctcagcttcgctgtgaaaaagtggccgaactcgtggatgaaaatgatgagcccgaagagcaatacgccgataacggcgagcaggatgccctgcaccaccgtgctcatcttgcgctctccccgcagcgctccagcacataggcgcgcgctttgcggtcagcttccaaaacgtcctccacgcttgtaacgggcgcggtttcaaatgtatcggctacatggcacacgagctcgccgatgtcctgccagccgattttttcttttaaaaacagcgcaacagcggcttcgtttgcaccgttgaccgccgcgggcaatgtaccgccgcggcgaatggcacgcttgcacgcgccgaagcacgtaaaggtttcttcgtccggcgcatagaacgtcaacttctgccaatcggccaaattcaactgctttacaggcgacgggaagcggcgcgggtaggtaagcgcatactggatgggaatgcgcatatccggcacgccgagctgcgcgatgacggagtggtctttatactcaatgagcgagtgcacgatgctttcacggtgcacaacaacatcgatgtcgtccggctccatatcgaaaagccacttggcttcgatgaattcgagccccttattcatgagcgtggagctgtctatggtgaccttcgcacccatgtcccagttcgggtgttttaaggcgtctgcggggcggatatgctgaagctccccggcttttttgccgaagaacggaccgccggacgccgttaagatgattttatttaagtcgcactttttgtacataccctgcaaacactggaaaatagcagaatgctcgctgtctacgggcagaatttcgatgccgttttccttggcggtcttcatgacgagtgaaccgcctgcgacgagcgtttccttattcgcgagcgccatctgctttttggcttcgagtgccgttaaggtcggcttgaggcccaccatgcccacgacggagtttaagacgatatcaacgctttccagctccgtcagggcacaaaggccctccatgccgctgtacaccttcacattgaggtcgcggacggcggcgcgaagcttagaagcagcttccaaatcaaaaaccgcaactgcttgcggtttaaattcccggatctgctcttccagaagccgaatattggaatgggcagcgagcgcctccactttaacggcgtgctccccttccttttgtatacagcgcacaacgtcgagcgcctgtgtgccgatggacccggtagagccgagcaaagctaactttttcatgcagacccatcctttcttacgacacgatcggcagcagcatcgttaccatgtagacaaacggtgcggtgaaaatcacgctgtcgaaacggtccaaaatgccgccgtggcccggaatgacactgccgaaatctttgatgtggcagcttcttttaatgagcgaaaagctgaggtcgccgagcacggacacaaacgcgccgaaaaagccgatgataaagagcgagagccagtttgcctgacgttcgccgccgtaaataccgtaggtgaaaatgagacccacgagctgcaaaatgatgacgctggacaacacgccgccgatgagaccctccacagtctttttggggctgatctccgggcacagcttgtgcttaccgaagagcttgccggcgaaaaacgcgcctgcgtccggaatccatgcggagaatacgcacacgagcgcgtagaacatgccgtgctggtcgctcaacgtgcgcaccagaacgatagtctgcagcgcgagcgggatcaaaacgaccatgctgtacacaacggccatttctttaaaagtgatctcgcggtggtggcgcagcagcgcgcagaaaatgcacgccgtgaacgcggaataaataaagatatttgcctgctgaaattcacagaactgcaccagcacggcagctgtcatgctgggaaccgtgatataccagcggtcggaaagtcccagcgccttgatgacttcaaaaacagcgagcgcggagataaacgcaatggcaatattgagtgccagcggaaaagagcggttgaacacgacgattgccatgaaaaatgcgaccagcgtgacaccggataaaactctgtccttcatatacctgtggtttcctttcaccgttcggaatgtaatagaaacgcggtacagggcggcatataccgcccgcactgcaaaaaatcatacaccgccgaaacggcgttgtctgctgttgaacttttcaatggcttcgtccaagtgcttcggcttgaaatccggccagagaatatcaaaatattcaaattcggtgtaggcgctctgccacaaaaggaagtttgagatgcgctcttcgccgcttggacggatgatgagatccgggtcaggctggccggcggtgtacatagcgccggaaagcgtttcctccgtgatgtcctcgggcgaaagctcgccgtttttgacgcgctctgccaaaatgcgtgccgcgcgggtgatctctgcacggccgccgtagttcatggcgaggttcagcaccatgccggtcttcacgctgctcgcttcctccacgcgatgaatgagcgcctgtaagtcgggcgcaaaagcggaaatatcgccgataaagcgcacccggatattctcatccataaagtcgcgcaacgcttcctcgaggtactggtggaaaagcttcatcagcgcagagacttcctcagcggggcggctccagttttccgtggaaaacgcgtagagcgtgagatattttacaccgatagacgatgcataccgcgtgatggtgcggaaattctgcgcgcccgccgtgtggcccgccgtacgcggcagaccacgctttttagcccaacgaccgttgccgtccatgatgatgccgatatgtgccggcacctgcacgggcgttttgttttctttacttccaaatgccatttcggagccttccttttgcttacagggtgagaacttccttctgctttgcggcagagcgttcgtctgcctgctttacgtacttatccgtcagctcctgcgttttcttttccgcctgcttcaggtcgtcctcggtcagttcgccgtctttcttcatcgccttcagcttttccatagcgtcgcggcggatggaacgcagggcgatttttgcttcttctgccatgtggctgacgtccttcacgatatccttacgcttctcttcggtgagcggcgggaaaatgaggcggatggtcttgccgtcggactgcgggttgatgccgatgtccgaggtctggatggcgcgctcaatggcgcggcagacggaaccgtcccacggctgaatggtcagcacgcgtgcctccgcaacggaaacggctgcaagctggttgaccggcgtgggtgcgccgtagtaatcgaccatgaccttatcgagcacagccgggtttgcgcggcctgcgcggatggcggcgtagtcgctttcgagtctcgcgatggttttgcccattttgctttctgcttttgccaatacttccttcataagtatattctcctatctgttatttcattatacgttttgtgtgctctttatcagggcgcacaaggcttctcccctaaaaagctttagtccttcgtgatgaccgtgccgacgttttcgccgcagacggcgcggacgatgttctccgggtcctcaatgctgaacacaaggaacgggatgccgcggtcgttgcagaaggaagcggccgtcatatccatgacctggaggttctgattgaggatttccatatacgtgagatgatcgtacttctttgcattcgggttcttcttcgggtcactgtcgtaaacgccgtcaaccatggtcgcctttaagatgacttcggcgtcgatttctgcaccgcgcagcgctgcgccggtatcggtggagaagtacgggttacccgtgccgcagccgaacacgacaacgcggcctttttcaaggtgacgcaccgcacggttgcggatgtacggctctgcgacctcctgcatggcgatagctgtctgtacgcgcacgtcaaggccgacctgctcaaggccgtccgccacgccgagcgcattgatgaccgtagccagcatacccatgtggtctgcacgggtacggtccatgctgccgctgcttctgccgcgccagaagttgccgccgcccacaacgatggcgacctcgcagcccatatccacgatcttcttgatgggctcgcagatcttgacaacggtgtcaaaatcgatgccgtgaccgatcttgccggaaagcgattcgccgctgagctttaaaagaactcttttgtactttaaattcatacgttcatcctcgattctttagtattccatatcctgtgacgcacacccgcaaattttttcaatttgcaaatgcacagatttatacttatacttattttacatgacagaccccgatttgtaaagcgtatttccgaaatgttcacggaaatgaaaaatttttgcacaatgcacgaaattcaaacggcgttcacagttttgtgctaaaagtgtcttatactaaaaaacggctgaaaggagtgaaaaaccacatgcagcttagaaaaacgattttagcttccgtgttttctgcggcgcttgcgctctctgcggtcgcctgcggcacagcggaaaacacacaaagcgtgagcagcgcggcggcttcagagcacgtagcggaaacgccgacaccttcccccgaagcgaccgcaacggcatcgcctaccgctgagccgacggtaaaatccaccgcatctcccgcaccggaaagcaacgaggtaagcgaaaacgcagagattactgcggagcttgaagcgatggcgccgcttttggaagcacacattctggcgcagatgaacggcatggcgttcgacgcgaatgatcccgtttacttttggcagaccgcggcctttgcggtggacaactgcggcatgacgttttacagcgcagagacgaccggcagcgcgctggtgctctctcgcggggtgatggaagaaattgtgagcggactattcgaaagcgccgcaaatgaagacctgccggatattcccgactcgctttcgggtgagatttcgtacgatgcggacagcgacacctatgcgcggcctataagcggcggcggcttttccgtggacatacaaggctgtgtgaaaagcggagatgtgtacaccgtgacggcagcgctcattcgcgacgagaacgagtcggaaccacaggcaatcttcacagcggagctcgtgccgaatccgcgcgaggacaataccgtatttatatatagtatacgcaccgtgaaacaaatttcataagcaaattaaaaatgtcgcgcagaatgtgtatttcttctgcgtgacattttattatcaaactctctgtgaaacacaacaaaatagtttcctaacactccgttcatttttggtacatgtatatcgatatagaaatatcaatatgcaaatttagcacttaacaaatcaaaaattttgatatacaatacagtcgtaaaaagaagttaggtggtgcaaaccaccgagctttgcgataaattgcttcacatagaaagggcgatagacttatggcaagatttacacttccccgcgatttgtatcatggcaagggtgctttggaagaactgaagcattttgaaggcaagaaggctgttgtttgtgtaggcggcggctccatgaagcgtttcggctttttggaccgtgcagtcggctatctgaaggaagccggcatggaggtcgagctgattgaaggcattgagtctgacccgtctgttgagaccgttatgaagggtgcgcagaagatgatcgagttccagccggattggatcatcgcgatgggcggcggttctccgatcgatgccgcaaaagctatgtggatcaaatatgaatacccggacgttacgtttgaggatatgtgcaaggtcttcggcctgccgaagctgcgccagaaggcacacttctgcgccatttcctctacttccggcaccgcaacggaagtgaccgcgttctccatcatcaccgattatcaaaagggcatcaagtacccgattgctgacttcgagattaccccggatgtcgccatcgttgacccggaccttgccgagacgatgccgaagaagctcgttgcgcacaccggtatggatgctatgacccatgcgattgaagcgtatgtttccaccgcaaactgcgatttcaccgacccgctcgccatccacgcaatcgagatgatcatgaaggaccttatcccgtcctataacggcgatatgaccgcccgcgacaacatgcacaacgcacagtgtctggccggtatggcgttctccaacgctctgctcggcatcgtacactccatggcacacaagaccggcgctgcgtttgccgattacggcgcacacatcatccacggcgctgcaaacgctatgtatctgccgaaggtcatcgcgttcaacgcaaaggacgagaccgcaaagaagcgttacggcgtcatcgccgactacatgcacctcggtggcaacaacgacgacgagaaggtgcagctgctcatccaatacctgcgcaacatgaacgacgagctgaacattccgcactgcatcaagcactacggcccggacagcttcccgaccgagaacggctttgtgccggagaacgtcttccttgagagactgccggagattgcaaagaacgctatcgccgatgcctgcaccggttccaacccgcgtcagcccagccaggaagaaatggaaaagctgcttaagtgctgctactacgacacggaagttgacttctaagtctataaagacaatctataacgcatcccgggcatctgtccggtaaaaggacattctatccctgccgcccggtatttcttcggaaatcgccgcacggcagggatttcctgtcttttcccgttgtaattttgatatttctctgttataatagtatcgtttgcaggttttaaaggcaaaaattgcaaaaccggcatccgacacagacaaaacttaggcaaaatcgcacaaactgcgcacatgcctgaagggaaaggttttgaagtatgtataagatcgttaaaaaacagccgctgaaccccacggtgacacggatggagatcgaggcgccgctcattgcgaaaaaagcaaagcccggccagtttatcattctgcgcgtagacgaaaacggcgagcgcatcccgctgaccgttgccggctatgaccgcgaaaagggcaccgttacaatcatttttcagattgtcggcgcaacgaccgaaaagctcaaccacttaaacgaaggtgaatgtctgcacgacttcgtaggcccgctcggcgtaccaacgcatgtagacggccttaagaaggtctgcgttatcggcggcggcgtaggctgcgccatcgcactgcccattgccgaagagctgcacgccatgggcgcggaagtcacctctatcatcggcttccgcaatcaggatctcgtaattctggaagacgaattcaaggcttgctccgaccacttcacgctgatgacggacgacggctcctacggcgaaaagggcaatgtcaccgccccgctgaagacgctgcttgaaaacggcgagcgttttgacgaggtcatcgccatcggcccgctgatcatgatgaagttcgtctgcctcaccacaaaggaatacgaccagaagaccgttgtttccatgaatccgatcatggtagacggcacgggcatgtgcggcggctgccgcctgaccgttggcggcaaaacgaagtttgcctgcgtagacggcccggactttgacggccacgaggtcgattttgacgaggcgatgagccgctcccgcagctacacttcttttgagcgccacgcttatgaggaaacctgcaacctgttcaagaaggaggttgagtgatcatgcctaacatgagaatgacaaagaaccccatgccctcgcaggacccgaacgttcgcaacaagaactttaaagaggtcacactgggctataccgaagaaatggcgctggatgaagcacagcgctgcctgaattgtaagaacatgccgtgcgtttccggctgcccggtcaatattcatattccggaattcatcaagaaggtcgccgagcacgactttgagggcgcgtatcaggttattgcgcagtcctcttccctgccggctgtctgcggccgtgtctgcccgcaggagacgcagtgcgaaggcaagtgcgtgcgcggcattaagggcgaaccggtcggcatcggccgtctggagcgttttgttgccgactggcacaacgcacacgctaccgttgccaccatcaccgcgccgaagaacggccacaaggttgccattatcggttccggccctgcgggtcttacctgcgcgggtgacctcgcaaagctgggctacgacgtgacgatttacgaagcgctgcaccttgcaggcggcgtgctcgtgtacggcatcccggagttccgtctgccgaagtccatcgtgcagaaggaagtcgataatctcaaggcgctcggcgtcaaggtggagaccaatatggtcatcggtcgtatcctgacgattgaagagctgaaggacgagtacggctacgaggccgtgtttgtcggcacgggtgcaggtcttccccgctttatgaacatcccgggcgagaacctgaagggtgtgtactccgcaaacgaattcctcacccgcagcaacctgatgaaggcttaccgcgatgattccactacgccgatccagcacgcgaaaaacgtggcggtcgtcggcggcggtaacgtggccatggacgccgcgagaaccgcaaagcgtctcggcgcggagaacgtgtacatcatctaccgccgcggcatggcagaactgccggcacgtaaggaagaagtggagcacgcagaggaagagggcatcatcttccatacgctgacgaacccggtagagattttgccgacggacgtcaccgacccgcgtgacccgaactacggctgggtcgccggtattcgctgcgtaaaaatggagcttggcgagccggacgcttccggcagacgcagcccgatcgtcattgagggcagcgaattcgatattccgatggattgcgttatcatgtccctcggtacttccccgaacccgctgctgaaagccaccaccccgggtcttgagacccagaagcgcggccagatcatcgcggacgaacacggcctcacctccatcgagggtgtgtacgcaggcggcgacgccgtaacgggcgccgcaacggttatcctcgccatgggcgcaggcaagaccgccgcagctgcaatcgacaagtacattcaggaaaagaagtaagtccgcttttcccctaacctaaaaatgaacggcaccggtgattgatttcatcggtgccgttttgctgtgtttggcgggtttaattttcaaatgcgttctgcatccactgcgtcgtgtaggcatctgccgggcggtctttccgcacgccggaaccgacctgcacgcccatcaaaatgcgcggctcgcgctcggctaatgccataaaacgcgccaaaatttcatcgtatctgcccatttttcacagctccttttttcaatttttttagaaaaacaagcagagtataccacgcttttcagagaaacacaacgcccttttgtatactgccgaaagcatcttgaattttcacggttttggcagtataattctattggcaaatctacccgaaaagaggttttcagaatgaaaaaagtgcttttgctcggcgattccattcgcatgggctatgacgattatgtaaaagaagagttagacggcaagtgtgaggtcgtttacgacgccgaggacaacggccgcttcgctgcgtacacgctgtggcaggcgaaccagatgttcaagcatcacggccattttgacgtgatacactggaacaatggctactgggatatgaacattgaggctccgatgacggaggccatgcaccccgttgaggaatatgtgcacttcttaaagcgcatcatcaagctgtgcagagaaaacggcgcgaagatcatcttcgcgaccaccacgccgattttggagcccggcatggcggcagacaacaccggcacgcaggcggacagcatcaactacaataacgagtgggtggagctgtataacaacgccgccaaaaagctgatggcagaggaaaacatcccagtgaacgacctttacgcgctgtgcaaggaaggcgagcactattataagtgcccggatatgctgcacctgaccgaggaaggctaccgcaagtgcgcaaagcaggcggccgacatgatcctgaaggagctcggtgaagcatgagctccggcgtaaaaaagacgaacgccatgcgcatgctggacagcgcgaagattccctatgaggtgcgcacatatgaatttgaggagaccgatctcgcgggcgtacacgcggcagacgccgtgggtatgccgtatgagacggtgttcaaaacgctcgttgcgcgcggcgataagactgggtttgtcgtgttttgcatccccgtagcggaggaattagacctcaaaaaagccgccagagccagcaaaaataaatctgtggagcttctgcacgtgaaagacttgctgccgacgaccggctatatccgcggcggctgctcgcccgtgggcatgaagaaggaattcccgacatatatcgacgagactgccatgctgtttgatgcaatcgccgtcagcggcggtatgcgcggcgtgcagctcatcgtaaacccggatcagcttttgggcttcgtcaaaggcgagtatgtcgatttgacggcgtaacacagagcgaactgtaacggcgataaaaaccttttgatctaacttttctcaaaaaaattcacgctcccctgcctacttctttaaagtatctgcagcgggagcgtgttttatatctgctatttttataaataacttttcgcgaaagcgtataatcagtggttcatgagcgcttcggcattttcgttttcgtttacaaggccgaggtcgtgcttgatcttcgtagtggagatgcccggcgtgcgcggcaggaagacgagctcgcagtaatccttgaggtagtcaaagcgatcgctgttttcccagtcactgcccataacgactacgtccacatggtagtccttcacgtcgctgatcttctgatcccagctttcctccggaatgacgaggtcaacgtagcgaatggcttcgagcatcattttgcgcgtttcataatcgtgaaacgcttttttgcccttgccggcgttgaactcatccgtggaaagcgccacgataagataatcgcccagtgcctttgcgcgctttaaaaggttgatgtggccgtaatgcagcaggtcaaacgttccgtaggtcaatactcgtttcatgttttagcctttcctttcgttttttacagcttgctcaatgctccggtttctgtaagagtcatcgcctgccgttacactttgaatattcagatgcggcaaaatacggaatacttcccgcgcgaaaacagcatcgcaattatacgtattacgctctctgctgaaaaacagcttgatgttttccggcaaagaaaggaacatctgcgtatcaatcacggtgtaatccagccaatcgttatatttatcggtcagctccttgagggtgagctcgttgaaatccctgcgcaggaaaaccgctacgggcgcttccatggaatgcagctgctgttccagctctttcgcccaacccttatggtcgttctttccgacaagataaacatttcgcggccgctttttgttttcggcataatcgattacttcaaacttcggcgcttttccgtagaacagcatatcgttcaggttctggatattatccggcgcatcgtaatttgtaaacatcttataatacgcgtcatacgccgcactgttcacgtctgcctgcttatcattttcgtgcaggtatgcgagcatttcgttcatggtataaattttgcggaacgggagatcgcgcacatccatatacatgccacgctctgccatgtacgcatcatagtcgtacataaagagcacgattggcttgcgcgtgatggaaaaatcgaagaaaacgctggaatagtccgtaatcagcacgtccacagcattcaaaaagctgtaactgtccacgtcatccgggaattttacaatgtgcttataaccttcgatcggcaccttgtcttttacaagcggatgcaggttcacgtacatgatctgcttatccgtcagcgcgctgtcgaactttgtcagcaggtcgcgcacttccgcttcgtacccgcctttgtttgcgccggagctcatcgcgccgcgccaagtcggcatgtaggcaaaggtttccttgccgtccattccgtattgcttccgcaccgccgctgccgcgtctttatcccagaatatcgcgttgcgcgggtacccgctcaggatcacctttcccgtatagaggtgattcaggttgtaatcttccatcatgtgatccatcgtatagcggttcgggtgcagaagatagctgctgtgcaggaaattgcgctgcatgttgctcatatcctgaatgcccatcgccatttttttgccgagggtcttcagcggcgttccgtgccatgtattcaaatagacctgcccttcacggcggataaaatacgttggaaagctcacattatttacaaggtatcggctcgttgccaaaatcttctggtattttctcgagccgagcggaatgagctgcacacggttcagcccatacgcatctaatatcttccggtgctcgcccatcagctcttttttcgacgtgtaatagatggtaaacgtcgggtcctttgccagctcgcgcatcattgcgaacggcgaatcatttaggttcgtaccgtggaaggattcaaaaagcacctgcttgtcgcaaagcggcttctttttacacgtgcgcacgtagtagtatttattcaaataactgcgctttgagaaaaccgtcaaagccttgcgcatcgtttttgccgctttgcccaaaaggcgcagcacggaattcggcatcatgctgtaaagataccacgtgaactcgtgcttggccaaagcacccatcagccgttttttggagaagaaaaagtcaaaaaacaccttgtttctgcgccagtcatcaaaatagtgatccagatgctgaaagcccttatggacgactttaaactgcaggtctttatctttatatgccgtaaaatcgcggaagcgcaggatcgtgtgcttcaaattgatgaagccgagcacctctttaaactcctcgaatgcgccttcccgaatatagtactcgttcatgattgcgagcgaatcatacatctgcaggatgttctcggagaatgtcgccgtgattgcgccttcgcgctttagaatatagtagtacagcggctcgtttactttggagattcggttggcatgcagcatcagcggatagatggtcgcaatatcctcataaattttccctttcgggaagcgtatccccgtgcgctcaaataaggcgcggcggtaaattttattccaggcatacggtgcatttgtgtacagaagcttcgggttttcgtgcaggctcacaccgaactccagagtgctgccgcgctggaaaaagcgccgcgtttcggtattttcgtctatgccgtaatagccgcaaaccacaatgtccgaatctgtttcagcggcgcggtcgtacagcttttggtacatagtcacgtttaaatagtcatcgctgtccacaaagccgatgtattcaccgtgcgcatacggaataccgtagttgcgcgcatcggataatccgccgttttctttgatgaggcttatcaccttctgcggatatgctgcggcataacggtctatgatcgcctgcgaattatcctttgtgccgtcgttgacaacaatgatctccatttcttccagcgtttgcttcactaaggaatcaaggcaacgctccaaatacgcttcaacgttgtatacaggaacgataacgctgacttttatcgaatcaaaattacattctgacttcattttatctatcctttatcccttctgtaaggaaagtcattataagatccacacagcgctgcgtgttgttcgtgtcatccgtctccacgaattcttttctaaaggcggtgagcttttcgtaatcgtagggcgtgtggagaatacagtcgaccagaggctcggcctttgtgaatgcgcagtgcggcatctctgcaagcgggtcaaagttgaggccgcgcgtttccttgtagcgttctaaatcgtaaacgtagaaatacaccggctttttgatgaggctcgcctcaatggaaatagcggaatagtccgtgatgacggcgtctgctactgccattagcgtgaaggtgccgaactccgggcactcgcggaatttcggcagcacacggcggcgctccaagcgctcgcggtcgagtgggtgcagccgcacgatgagcagcatacccattttttccgccgccgtgataagcggctcaatctcaggcatttgctcgccgtcgcggaacgtaggagcgtataggacgatcttctgcccgcgcagttccgggtaggccgcgaaaaagcggcggcggcaacgcgcgcgattcattttcaaaatggcgtctacgcgcggcacgccggtcacgcgcattttatcggcagaaacgccgaacgcctcctcataggcttttgctgtacggtgactcgcacagagcacggcatcgtagtgcttatgcatccccatgcgctccgcaagctctttatcgcgcccgccgggcacggaaagcgcctgcctgccaaatttcttaatggcgccaagcgcgtgccagacctgcaccacgcgcagctctttacggtgatgcagcacgctgaccgggatgcagtagccgtctatgatgcacacatgcgcggtggaaagctccgcggcgcagtgctgcaaatggaaacaatagcgcaggagctctaacggcgtatcgcccatttcgcggcagagatacacaaggcgcacccctggatcacgcgcttcaatctctgcgccgagctgttcaaaatccggccgctggctgttcgactggcggctgatcatgacgacttttttctgcatggggcgcagcttcatgacggcgtacacggcgttatacagcgctttgaaaacggagatcagcccgagcagtattctttttttcacagaggcttcgcccctttctgtgcagcgccgttccatttttgcgcatagcgtgcggcctttgcccgcaccccaaacacacgctgccaaatttttccgttgcggaaagccgcactttttcgcattaaacagagttagtataccacactgtgcagaaaatctccagtgttttaccgcaaagttcgccgtttcattaaatctttgtaacagtacggaaaaatttgcgcccgaacccccgtgaatttgtcgcattcgcaggaaaattcagggtattttgcctcctaatcctgcgtcaaaatcgtctaagaagtcacaaattcgccgtaagccataggaaaaacgggcaagcaccgaaaaagtgccgcccgtttttgtttagtcgaacgaggggttaaacgcgtagaagtttttggaatcgagtcggtcagtcgcgatgcgcaagccctcgccaaagcgctggtaatgcacaatctcgcgctcgcgcaggaacttgatggggtcgcgcacatcgggatcatccgcaaagcgcaggatgttgtcatacgttacgcgggccttctgctcggcggcgaggtcttcgttgatgtctgccagcgtgtcgcccgttacggcgatgcacgctgcactgaacggcgcgccggaggccgctgccgggtaaacgcccgtcgtgtggtcgatgaaatacgcatcaaagccttgcttttgaatttcctcctgcgtcaaattccgcgtcagctggtacacgattgtccccaccatctcgagatgagcgagttcttcggtgcctacatacgtgacagaaatgctccggtgtcctttcttggaggacaagcagttgcgttttggacttaaaatacatagtcttaccgaacttaagtctgcaaaaaagcgctgcaatcccgataacgcaaaacactcaaaaagccctgatttcatcgaagaaatgaagccaaaacgaattgtaaatctgtatgcggttgcttctgtatgagtattaactgtgtaagaatcgccgttaaatatgtttctgctgtttgcggacaagcaaatctgcacttttcaactggttgcttcaagaaaagtcgaaaatcactcgatttaccgcagttgattttaaactgaaaattggatatttgctcgattacatagccgcctgcttcgccgcaggcggctaaatttatgtgaaggaggaaaacccatatggcaaattgcaaagtgatcgcggtgacgaaccaaaagggtggcgtgggcaagagcatctttgcccacgacaagaacggcaaggtcgctgccgcataccgatcgctgacaaaggaggtattggagcttgagcgcaaaaccgagagatttagggatgacgccgctcgatgatctgttctccaccgacgagagtcgtgcggaagcgcagcttgaaaaggtcgtcacgctgaaccccgccgacatctccgactttcccaaccatccgttcaaggtcaagcaggacgaagctatggcggagatggtagacagcgtaaagcagtacggtgtgctggtgcctgcccttgtccgccccaaagcggacggcagctatgagatggtcgccggtcataggcgaaaatgtgcggcaacgctggcggggatcaccgaaatgccctgcatcgtccgcaacctcactgatgacgaagcgacgatcatcatggtggacagcaatttgcagcgagaaacaatcttaccgtccgaaaaggcatttgcctataagatgaagctggaagccataaaacggcagggtcagcggtcggatttaacttcgaccccactggagccgaagttaaagggtagccgttctaatgaggaactggctgcaagcagcccggacagcagatcacaaattcagcggtatatccgcctgaccgagctgatcccgccggttctggacatggtggacagcggcaagattgcttttcgtcccgccgtggagctttcctacctctccaaagaacagcagcagagcctatacgacacgatggagtgtgaggactgcacaccgtcgctggcacaggccatcaaaatgaaagagttcagccgggacggaaagctgacggaggaagtcatcctctccattatgcaggaggaaaagccgaaccagcgcgaaaagcctgcttttcgcgacgagcgaataacgaggctcattccgaaatcgattccgcgagggcaggaaaccgattttgtgatccgagcactggaattttataatcggcacttgcagcgccgacgcgatcaggaaagataacgggacgccttagggaaagtctgcccttttgcggaagtgaaacggctgcgcaaattttctccccctctccacacctcacccctgttactacctgtactacccgaaaaagaaagatcacagctatatgtggtctgtatagaaattttccgaaaggcggctgaaaagccgctttttgtttttcagaacgaacggagacaaaaattatggttcatttctttgatgcggacatagcgaaaaaatacggagttaatgcggcggtgctggcctgcttcctttgggattgtaccgagcagaaaagtgccgaatcgccgcagctccatgaaggcaaggtctgggtgcgctgttcggtgcagatgatgaccggcttttttccgttcctgtcctacgacgagatccgctacgccctgaaacaactggtcaaggggcgggtactcacaaaagggcaattcaacgagagccgctttgaccgcacgaactggtacgcctttaccgagttcggacaattcctgatggcagaaagcgagggacgaacgcaatgaaggacggcagacacatcatttggagcaacgacattgactacgacgactggcgggaagacttggaggagcaataccccgacctcaccgaagccgagcgcatggagctgatgtatgagttgaacggcgactatctggacgacgagcgctccaatctgaacatccagctctcccgtcccattctcgttgtcggtgatctggggctttggaacggccgtcgcatggggtataaggagattccgagcggcaatatccgggactgcctttacagcgaacgggacatagattacagcacttggtatgtggataaaaacggcgacttccgctgtgacgccatccatcacgacggcacgaaccattacctctaccgtgcctataaggacagcgtgagcgacacgcagatcgagaatctgaaagaaaaaatctaccggggcatcgccacccgtgcggacattacaagagtgacccgcaggctgggcgacgagatcgcccatgtttacggctttcccattccccgcaggcaggcaccggtgcaggaacgataacggaggcagctatgatgaatgtatcagatacaaggggctgcgcttttgaagcctttattaccaacctcggcaaatacaacgagggctttttggtgggcgaatgggtgaagttccccgtgaccaatgaagaaatgcaggcagttttccggcgcatcggcatcgggcggcgctatgaggaatggttcatcaccgactatgactgcccggatgcggccatcggcaaggtgctcggagaatacgaaagcctgagtgagctgaactacctcgccgggcagatcatggagctgcgggagagcgacgatttctggcaggcggtcttggacttgggcgagaacaccggcagtgtgcaggagctgatcaacctgaccgagaatttggactgctttgattacctgcccggtgtgcggaatgactacgacctcggctattactggatcgaggaaagcggctgctatgacacaagcaacctcggtgcgctggcaaactatatcgactatgatggtttcggacgggacattcggtatgaagaaggcggcgtgttcggagataacggatatgtgcggtcaaacggcggccgctttgtagacatctacgacggcgacatcgagaacatccccgaagaatatcggatcagttcgcccgccgtccccatccgctccgcagccccacggcagacggaacagcccgaacgataaaatttgcacctttgatattaaacgacgcaagcggtgcagagagatctgcgccgcttttatgttagaaaaaatgcgaagcagattgaaaaagatatgcatagcatgaagtttttctggaatttcagcaaaaactattgattgaaacggcgtttttggctatactaatagtaaggaggcgataccatgatcgttagaccctactatttggatatactgaaaacctatcgggatgttccactagtgaagatccttgccggaattcgccgctgcggaaaatcgaccattttggatatgttaaaagacgacctgttcggtaacggcattgcggcaaaccatgtgatccaccttcgctatacttcggaggaactggacgagggcatgaccgccaagcagatgtaccggaacatcaaggagaaaataaccgacagcgagcgttactatcttctgctggacgaagtacaggaagtggacggctgggaaaaggcagtcaacagtctgctggaggatttcaataccgacatctatgtgaccggttccaactctaagctgatgtccagcgaaatctccacctatctgacggggcgttatatctccatccccgtctttaccctgtcctttgccgaatatctggagtttaagaaggacagcggccgcacgccgaaagaacttttgaacgaatatatccgcatgggtggctttcccatcgttgcgctcggaaacttcgatgagcgttcgtcctatcagatcgtcgaggggatatacaattccgttatcacgagcgacattacaagacggcataatattacaaactttgatttgtttaaccgtgtagtgaagtatgttgtggaaaatgtcggcaagactttttctgccaacgccatcgtaaaactcatgaaaggtgaagggcgctccctttcggtggaagcggtctataactatctggagtggctggaaaaggctttcgtgatctatcgctgccagcggtacgatatgcagggcaagaccgtcttgaaaacgcaggagaagttctatcttgcggacgcttctctcaaatactgcatgatgggctttaatccgaaatccgttgccgctatgctggagaacatcgtgtactttgagcttcgccggaagggctatgatgtgtatatcggcaaaaacgccaccaaggagatcgacttcgtggccgtacagcgggacgagcggatctatgtgcaggtatgccgcaatctgccggagggttccgaccgtgaggtcgccaacctgttggagatcaaagaccattaccctaagtatgtggtgacgctggatgaactagccgcaggcaacattaacggtgtcaagatcatgcatttggcggattttctgctgagcaaggactattaaacggtttcagcatataaaatggtcgagatatatgcagataatcgcatagccggacggctttcatccatgtgagagctgtccggtttattttataacagggcgttatagcaagccgttgtcctcccaagtcagaaaaatgtgcgaattcgcagtagaaaaagtcggaaaaatgtgtatccaacttctgaaagatcaaagacttctatgaaacggcaacatatcggatataccaatgccgtggcctatctcaaaaaatcaaagcgatcgaaacagagggcacggaaaccccgtgccgttttctgcatatacagttctgttatctgcatataaaacggtcaaagtatatgcagataactacatagccgagaggttttcattctgaaagcccctcggctatttttatgtcagaatggaggtgaaacatatgccatatatcccgccggaggtggtagcgcgagctcgtgagatagacttgctgacctatctgcgaacttatgaaccgcaggagctggtgcatttcgggggcagcacctactgcacccgtgagcacgacagcttaaaaatctccaacggcaaatggtgctggttttcccgtgggatcggcggctattctgcgctggactatctcattaaggtcaaagagatgccctttacgcaggcggtcgaaaccatcataggaaatctgtcagcggcaccgcccgcctttgccccggctccgaaaacgcagaaagaaaaggtgctgcttttgccgcaggtcaatcgcagcgccacccacgccgtcgaatacctgcaccgcagaggcattgacgatgagctgatcgatttctgcatccagaccagccgcctttatgagagctatccctatcacaatgtggtgttcgtaggaatggacgcagacggaaagccccgctatgctaaccagcgtgggatcggatcggacttcatcggggatgccaacggcagcgacaagcactattcctttgggattcctgcggcggccgcaagcgatacgctccacctgtttgagtcggcggtggatctgctgtcctatgggacgctgcaaaagctggacggcaaggactggcgcagtgaaaacctgctctccctcgccggggtctacaagccaagggcaaaaatcgaggaaagcagcctgcccgccgcattggtgcggtatcttgccgagcatccccatatccgtcatgtggtgttgcgccttgataacgacgccacggggcggatcgccgcagaaaccatcaaggcgctgctgccgagaaaatatgcggtcacggtggacatccagccgcccccgcagggtaaggattataatgactgcctttgtatgcggcttggattgcccatcactaagcgcggagaaaggagcaaagaacgataaacgatttaatttttcaacgatgaaaggagttttcaattatgagcgagaaaatcaaggtggtactgctggaaccgggcaagctcgcccgcactgccgagatcgacgcatcccttgccgggatgcagaaagtagtgggcggtctgatcgagccgttctacccctttgaggagcaggtctgcatcgtctgcaatgaggaaagcaagatcaacggaatgcgcccgaaccgcagcgtgaagaacgacgacggcgtgatggtggatttcatcttcggccccgcctttatctgcgactgccggggtgaaaatctggccagtctttccgacgagcagatcgaccgctatggcaagatgttccgctatcccgaacaccttgcgagggtgaacggtacgctgttcggtatcccgtaccgtccgcagccggagcaggagcggtgatgttatttcgatcggtggcaaaatgttcggcctatgggacgaacgctatgcactgtaccagcaagcatcgccgttgtgataccacaacggcacttgccagggaaatccctgaaacccttttcgtccccgcccatgcggagggcgatatttttatacccggaaggaggaaagccggtgaacgaacccatgacctttttggactttttcagcggtgtcggcggtttccgtaagggctttgaactttgcggcatggtctgtaaaggccattgcgagattgacaaattcgcagaccgcagttaccgcgccatacacgatatacaggaggacgaatggtatggagaagatattaccaaaaccgaacccaaccacctgccgagggtcaacctatgggcaggcggattcccgtgtcaggatatttctgtatctggccggcaaagagggcttgccggaaaacgaagctctctcttttttgaaatcattagactgctcaaaggcacgcctgccgaggatcgacccgaatggcttgtccttgaaaatgttaaaaatctgctctccgttaatcgaggatgggactttgcgaccgttctccattcgctggccgaaatcggctatcatatcccaccgccatcacgcagaatgtggaatacctgctggattccgtgcaggcgagcacgatgctctccaattcggagttcattatcatgctcaatcaggcgttttccgaccgtgccaagctctcgaagctcctgaacatttccgacgagcagatgagctatgtcaccaatgccgacgcaggctgcgggctgatcaagtacggctcggcgctggtgccgtttatcaaccgctttccgaaagataacgagctttaccgcttgatgacgacgcgccccggcgagggtgtgttcggcaatgcgcagaggtaaagccatgcccgacatcaaaacgagagatgcggtcaagaaaacggtaaaggtgattgacaaatcggtggtagccgccgagcggatgaagaatgcctatatccgcaccaaagacaaagcggagcacggcatttttgcggcggaatcctctcccgaagaatacgccgctgaccgcactttgaccgggacggaaacgacggcgcacaaagctgttcaagagctggataaagccggccgcaagggtgtaaaagctaccaaggagaatatctccaaagcaaagggctattttcagcgaagaagaaccgacttgccgaaaaagcaggcgcaagacgccatgcggcgggtgcgccgctctgccgatgctacgcaaaagacgatcaagacggtcgaccgtagtggcaagaccatcaaacagacggcaaaatctacgggcaaagcggcggtcaagaccacgcagaaaaccatcaagaccgccgagcagactgcccggacgaccataaaaacgacgcaggctgcggctaaaacagcacagaaaaccgcacaggctacggcaaaagccgccaaaactgcggcgcagactgcccgtgcggcaacaaaagtaactgcggcaggcatcaaggcggcggtcaaggctaccactgccgccgtcaaagccatcattgccggaacaaaggcactgatcgccgctattgctgcgggcgggtgggttgcggtagttatcatccttgtgatttgcgtgatcgggctgatcgtcggctcttgctttggcatctttttctccggtgaggacagcggcacgggacagaccatgcggcaggccgtgcaggagatcaacgccgactatcagtcgcagatcgacatcacaagggcaaatctcacctacgatgagctggaaatgtccggctcccgtgcggtgtggccggaggtgctggcagtgtattcagtaaagaccaccaccgaccccgatgattcgcaggaggtcgctacggtggacgacagcaagaaagtcatcctcaaagatattttctggcagatgaacgagctatcttcccgcaccgagagcaagaccgaggaggtcatcaccgaaactgacgacggccacgggaacatcgtggaaaccactacgacggtcacacgcacctatctctatatcacggtcagccataagaccgccgaggaaatggcaaatcatttcaatttcaccgccgaccagcggcagcagctttccgaactgcttgccgaggaaaaccgcaggttgtggtctgctgttctctatggtatttattccggggatgatgccatcgtcaagatagcgctgtcgcaagtcggcaatgtgggcggtgagccctattggtcgtggtacggatttaactcccgtgtggaatggtgcgcctgctttgtttcgtggtgctttaacgagtgcggttatcttgatacgggaaccgccccgaaatttgccgggtgcgtcggcggcgttgaatggttccgcagccgcgggcaatgggcggataacatggttaatcccgctcccggcatgatcgttttctttgactggaatgacccaaacggcgcatccggtccgcaggacggcgaagccgatcacgtcggcatcgtggaaaaatgcgaaaacggcattgtctacaccatcgagggcaactccggtgatgcctgccgccagaaccaatatcccgtggggtattatgaaatcctcggctatgggatcttgaacccgtaggaaaacagccgcctgagttaggcggctggtacataatttagcaatgttccttcgcaatacaagtaggtatacagtgcagtgaaatcttcagacataatttttgctcaattcagacaatattttggcacaaacgtcaactatatgctattgtatagacaaaaaattcaggtttcggctatatataacttgaagcttgattttgcaagcagtggtggccaccacagacaaaaaatattttttagcgaaagagtgacaaactcaatgaaacccaaaagactgttagcgttgttgatggctgttgtaacggtggtatccgtatttacgatacgttacataaattttgaattctgaatctatttgaatgtagatttttatataatcttgtaaatcaactcaatttaggagttaatattatgaacaaaaaagctataatctgcacggttgcaattctcattctactggtcggcgcatcggttatttattttactatgaatcgatcaagtgaagcagaaacggcaaattcatcatctatgtcaaacattgaacccgaaagctcaaattctcaatcagcgatgccaagtgattcacaggcggaaaatgaatcgcaagaaagtgcttctgaaacaacttcgtcggaagtgaattcaccggaagctgatgcgcttataaaaacttttgcagaaataggggaaccctatacgctgcacagtcggtattataatcaaggcgaagcaaaaactgatgatgcaccggggctcggttgggacggcgatttggagctttgtataactgatgctatcgttaaagaatatgaggaaagtgatattaaatataactcggatagttctatctgggcaagatacgcatccgactttgaagacccgtgcatactgcatgtagaattatcccttaagaatattgatgcagaaaacaaaaacggcgtaaaatataaattcaacgccaatatgtttgtacttagcgcgtatgaagatctccttcccgagaatcagaacaacccggaggggtatacaaccgtcggaaattattattctgcatacgagacctattttgatccacacggtcccggagacgattactggagctttgaattacagccgggcgaaacgcaaaatttcacaatagagtttttggtcgaccgcgtatatttatcgcaaaaagatccgttcttggctattacccccggcagagaaatcttttacggcgttatgctgcgtgatttagcaaaatgaaaggatagcccacatgaaaagtcttaggcactttctgcaaaatgagctctacaatttatttcacagcaaatcatttctatttgtgctgctgattttacttttaatcgtaacagcagatgatattttggcttataaatcatataaagataatttacagcttactcttacaactgtagacttgcaggcagacggcacttttgccgaataccctttcctgcaaatctacactctttataattcgtggatcggcggtcgagccaatgaaacgctgccgatggttttcttttatacgatgccggtttttgtcgttatcccgtacagctggtcttatcttgcggaagaaaagaacggatacgaccgcattatggcatcgcagcttggaaaagcttcttactttttaggaaaatatgtctccacgttcctttcaggggctttaacggttttgctgccgatgctttttagctttttgcttgcgtcatgccttgtgccggcttatcgcccggatataaactttgccttatattatcaagtaagcgcaactaagctgctcggaaacctctactacgctcacccgttatgcacagctttcctgaatatgctgatgatcggtatatttgccggtgcatgggcaacgattccgcttgcactttcattctttgaaaaaaataaatttgtggttctttttgcaccataccttgtactgctgtatatcatcgcatctttgcaaaaagcatccgtataccgctcatttaccgaaacctctgttctaaactacatttggatgaccagttcatcgtccaatcaatctatcgtggtctatacgattatgacggtttcactcattcttctgccgctcgctattgttttggaaagggggaaaaacgcagatgtttattaaatttttggatcacgatttgcgctacggcatagggcgtgctaaaaagcgcttaatcgttacatttattatgtttttcttcctttcgatctatcatttctggacgctgcgcattttcgagctcacagatccgcaatatctggaatctcctgttacaacggcagactatttcttggcattgattggcggctgcggtaaagtaaatttgatctccggcgcagaaaacgatttcgtaatgccgacgatgtggttcgtattcgttttgtggatgcagtttacttctctgtattatccgtttgcagaattaaacggcataggcaaacagctaatggtgctctccggcagcagaggaaactggtggctttcaaaatgtgtttggacaatcatcaataccattacaaactatttgatcgtttttgcagccagcacgattgccggattatgctttggtgcaaagccgagtatgcaggcaaattggtatgtttcgagagagctctacatgaaagtagacgacctaacgagcagcaccacttggaatatttggtcggtatttttaatgaccggcttcaccatgatcgtactcgcattggtgcagttgatcttatctcttattttgaaaccggtgcaaagctacttcgtacttgccggctatttattcgcaggcgcctatattcaaaacccggtgttttttggtaactatgccatgggcgcaagaaatgcactgcttgtgtcaaccggtctgaccatgccgttcggtatattattgggaatatggctcgctgtgcttagtatcggtatagggtattttgtgttccaatatcgagacattctcggctcagacctatcgtagtcatgaaaaggagtaagcctatatggaaatcgtagtaaatcatgttacaaaaacgatcaagaatattaccgtcattgaagacgtctcgctcacccttacaagcggtacgatctacggtctgcgcggtgtgaacggctccggtaaaactatgcttatgcggttaatcgccgggctgatccgcccgacggaaggcacgatcacgattgatggtaaggtacttggaaaggatatttcttttccgccggacattggtatgctgattgaaaacccggcatttatcgatcattatacggcggcacagaacttaaagctgattgcaaatattcaccgaaaagtcggggaggaacgtatccgcgaagtgttggagcaggtcggactcggcgcggatgatccgcgaaaatacaagcagttttcactcggtatgaagcagagattaggcattgccggagcaattttggaatatcctgcgctgcttctgattgatgagccgacaaacgcactggatacagacggcatagaaatggtgagagatctgcttcttgagcaaaagcagcgcggcgcactgattattctggcatgccatgatttttctgttttgcgcgagctgtccgatgaaatctaccttgtacgggaaggacgtgtaacgccgtatgaaacgcaagataagagtgagtaaaacgctttcggtcattcttttgtccgttgcactggtgctttgtgcatggcgcatctggtacgttaatgcaactgcctattcatttgaaacgcaggaatacggcatcggcgaatggattcccctaaacggtgattttttctactcaaaagaagaaaataccaatggatattctgttcgtgttcgtgaagcggaagtagtgcgttatgaagattttatgcagcgattcggcaagcctgtcgattatcttgcagaaaacacgcagcatgacgtggttctgctgaccgttgatttcaaaaatgaaaacaatacggacggcggcgtttttatccgcgattttaaccttttgaatgaagcgcagtccgcttacttcaataagagtgaaatctatatgaaaatcgcaaacccggatcttaactcaaaagcagatggcatctctgtgatgcccggaacggaagcttctctttatatggtctacccaacatccagccgtgcagatggcgtgacttaccttgaggaacaagccggaaaagaacaaatcgttatgtacctaaatgtcagcttgtacccagtgaaaaaatgcgtgcgtatggttcttccgatgccgtaaaaattaaaaccgcctgctcatgtatcaaaattagatacatagcgggcggttttatatggaatatgaaataagaagttatcttacgggttgttgtatttcattaggtgttttatatagtaatacgcttctaatggcagtaaagtttgagtgactgatcggtaggctctcttgattatccaacttaacttctgcatcagcaaagcaagtcacatgatctatatttacaaagcagcttctgtctataaataaaaatctactgtcatttatttctttataaatctcttttaacggtaattgaagatgaaaattgccgttctttgctttgatcatggttatacgattaactcgctttacgtataagacatcatctaatggaattcggataatttccgaataatgagaaaacgtgtagtatcttttttgctttttagcggaaatttccagtgcagtgcaaattgcttccgacagatccgaaaacaaattgtgtgtggatagataccgaaatgcgcctacctgataccccagccgagtaaaatcgtagtcgagaaactttgaaaagagaatgacgatagtgtccgtagcggtttttcgtatttccgaaagtaaacgaaaatcttcatgtggatgagcatcaatttcgaccataagaatatcgaagtgaattccatctaccatatcatcacgaagcgatgctaattgcttatactgttcaatcgaaatacacttagtttcatttttatatgtttctacaaagctttgaatatgagattctattttttccaatagttcgtagttttttccgcaaagtgctaaacgaaacatgattatacctcccgtccgcaatttagtatgttctaatttcagtagaatttcttaagatactaaaggttcgcttatctttagaaaattactgaataagaatcttaaagtagcttcatattatcattcttctttaattttgtacgtatttttgcatgaattgattattttgttgatttaatccataattagtaagtccaaatcaagttttttgtatgacaggcgtttttaatacttttagagaaaaataaaaacaaaaaaacaacgctatgatgattcataaaaatcgccatagcgttgttttactcttattaaaattaaactttataacacctttaattagcacatttctcaaaacagtacataaaattctgcgattcaagcaaaaatgcagagttttaaattatgttattctatactgatttggggtgttttaatttgtttaagccccgaataacctgcagcacgtacttctgttcctctaaatccagtttttgagtttcctttaatacctgcgacaaaatatagtcttgcgtcacaggcgtatctaaattaatatagaagtcatcgattctcataccgaaaatttctgcaagcctttcctgatgtttcatattcggatgcagagacccggattcccatctggcaatcgatgaaacggaagtatcacaaagttcggcaagcttctcttgcgtcatgccttgtaaaagtcttaattctttgattctaccaccaatagaattgcccatagaaccacctctacaaaattttagcaagaaaccttattttgcaccattgcgtaaaacgcaaaagaggtttacttatttgacaggttccgatataatgagaaaaagataattggaggttattctatgcaatatcaattctctatgaacgaatctgttgaatctgtaacccggaaattggttgctctttgtaaaacacagaaggccccagaaagccgagctcaaatgttccgattattccagctgttatgcagtatgaaatttgatttttatcttatattatctattctctgtaatctaaacgagttcagtacatctgaacttaaaataattttgcaagcctctccctcgccagatcaaattcttcaaccgacaccgcagaatattcgtattactattcctcgttggacgccttcaaagtatcattctggccgcattgcagatattgttacagatgtttacgaaaaaatagatcgtgctcttcccggtatttacatttataatagtaatttaaaccctaaaaatgcacgcagcttaaatgatctgtatgtattggtaattgtggaaaactcaatcagatggtatgatataaacagacgatgtaattactcattttcaaagcccacaataacagaggaggtttatacccatgttgaaaatagctttatgtgacgacgacgctgtgtttctcaaagaactcacaggaaaaatacaagagttgttacgttttgaagagaaaaatgcagccattgcatctttcgtaaatccaacagcactcaccgcttccgttgccagcggagatcgctttgatattttcattttagatgttgaaatgcctcagatagatggattcaaagttgcggctgatcttcgaaagtatcagcccaatgtcgcattaatctttttaacctctcatttacaatatgcgccggaaggctataaggtagacgcacttcgatttatttcaaaattaaatgtagacgaaactctgcctgaggctttacagaaagctcttcacacattagagcaacaagatcagcattcgctacttgttcagcactataaaaatttcagcagagtactttaccagaatattatctatgttcgaaaaactgcccgcagtgtgcaaatcattacgtcaaatcaaggtgtgatcaaagataatcgaggtataaaagaactatttgacatcctcaatgacccgcgattcattttcgtagatcgaagttattttgtaaatttggattatgctaaagaattgtgcggtaactctattatcatgttaaacggagaggcgctgctggtcagccggcccatgatgccgaaagtaaaagaagctattttgtctttgtggggagatggactagtaaaatgacatatcaaattgtagattggcttatttcgtatatagaatgttttgtaatgttagttgttgtcaccgaatccggcggtcggaaatttgaagagaaaaaacaggcttatctgcttttatctttctccctgctcaacgcaattcttgtggctgtatgcaatcagatttctgctttttcttttattacgcctgtgttgtctattttatatttaacagtaatttcacgcatcctttcacgcgggaattttctgctgcgtatctccataagcattacgaccatgtttgttatactctctattgactatattcttatggttgtattctgctggatttatggaggagaccaattctccatagcgtttaacgtatttatgacgccaggacctctacgctgtttatatcttattctggataaaataaccgacattgctttatacatggctgcgcggaaatacctttctaaattatcagagctaaaatctcgctggcttatcactttacttttctctggttctctcgtatatcttataactcaaattctttttagggcaattttatcagaagactatatccagctttaccgagcgtctatcttatcctttttaattttaatattattctttgccacgcttttcctattactgctgaacacctccgcaagagagcacgaaaatgtgcaaaaacagcttttactacgcacaaatcagttaatggagcagaactatcaaatgctgcatgaggatatgaaagaaaacgctaaaagattgcacgattttcatcatcatctcaaagcaattctcggattggctgaagctgctcagaacggtgaaatacagaaatatgtcggagatttgttatcgatttcgtacaaagaagttcatttgtgccgctgtggaaacgatgtaattgatgccattttgaattgctctgccgcagaagctaaaaaacagcaaatctattttcaatacgaagttaacttcactgcacatattcccgttgctcccgtagatttgtgcgccatactcggaaatcaaattgaaaatgcactggaggccaaccgtcaaattactgatatttctgcacgctatgtaaaaatcatgcttacacaaaagaaaggatttctcattttccgtgtggagaacgcctctgccgaaaatcccttttcagaaagcggagcgctaaaaacaaggaaagaagacggaaatcttcatggtctcggaatcaaaaatattcaggacactgtaaataaatataacggctggctaaaaaactcttatgatgatcacaccttcatttcagaagttcttttgtgcgtttcaacagtttaagacataaaatcttacaattcgcgcaaaacctatgacttatatctatataaaatagtatactacaccttgtaagaaggtgaataaatgttacatagctgcgctgaatacttaacccacactttataccgtcattgcccgctttctgaagaaaagcgtccggtttttgtatacggtttcgaactaagcttatcaactctatcgtctatactttccattattttactttctattatatttaagaatgtatatttttctttgctgtttttatatatctttttcttcctgcgccttttttccggtggataccacgctcccacctattcaagatgcttcatactaacaaatgctattttcgtatttgtataccttctgagcgaagttattcggtggtacaagcctctgcttattccttttgctattttatcttgtatctccattttccttctctctcctattcgaagcactaaacatccattatcggagcggctctatgcgcaaaataaaaaaacagctcgaattatcgtttcgattgattttttgctgtttttaattttgtacatcaccggtatgcccactcgttacttagctacctgggcactgtcattatcggcagttgccattatgatggtaatcaccttatttaaaaagaatagcacaaggagggaaagtgtatgaacgcatggacagttttggcaaagattgttgaactgtttgcatcgctcggtgccggcgcagcttccaatggctgcagctatgagcccgaagttccgagcatgcttcagaagtaatcgaagcccaacacaaacctcaaaaacctgttctttatgtcacatgaagaacaggtttttgattagaaaaaattgaaagtggtgacctaatatgacaaaggatgaagtatatgaatattatttacattggcgaaaaggcagccgcactctatccgttgaagaacttttctccgcttatacaatcgatcaaaatattttcgagagttcatctaaagtcataaatcgtcttttttatttggtgccggatttctttaaatcaaacttgcgaattttcattttttacgaagaaaacacctttcttaaagattcaaaacaaaacttaaagctaattcaaagcaatttaaaaattcaatataataaaacagaatatttaactgtttagtgttctgcatcatttatagttcttgtatttttaccggggttacgatcttcggagcatttcaccactttcctgctccccgcgccccgcctccgatcaatttgaaatcgaattcaaattgatcggaggttattctattgtcaaacgagcctaaatgcgtctatatcaaaacagacgttggatatgtacaaatcacatatgcggaattttgccgcatacgaaacacaactgaaaattacaaagcttcgcactggttcataccggtacaaggcgttctgctggaagttccaaaagacgcctacaaagccttctaccgagagaaggaacgtgagcgctatctaagaaaattagatagcgctctttttttatgcaatttagaccttaaatccgaggaaatcccgctgcgcgatgaaaacacggacatcgaacagcaaaccgaagaccggctcatgattgaaaagatgtactcctgccttcatttactcgacccggacgatgccgaatgccgttgccgtttggaaatgcgtagacagcgccattcagcgcatggcgacttttacgggcgggcaaaccaccgtttctgcctatctgcgccttcaaacagaacgcatcaattacggtgagctgatcattcaaaagacctccgaagacggaaagaaaagcggcttcactttcaaagtcacgagagataccgataactggagtgtaacggtcaaaacggacgacaacggtacagccaaaatcagcgagctgccggtctttcgcggaggcacgagcacgctcattcagtacaccgtgaccgagatcaacacgccgtcttcttaccgccaaccgaaaccgcagacgatcacattgaccgccaaaagcagtgtgaccgtccagtttgaaaacacgctgattcgcggcactctcgaaatctgcaaagtcgatgcagacggcaaaacaccgcttgcaggcgccgtgttcgagatcatggacagcgacaaaaacgtcatcgcgaccgaaaccaccggcaaagacggcaaaattaccgtatccgacctgcgctccgggtactaccgcgaaatctccgcgccgcaggggtatgaattggattccaccgtgtacccgtttaccgttgaaaaagaccggcagatcattcaaatcgtccgcaaaaataccccgagcgccggttctgtttcaatccgaaaaatcacaccggacggcaaaacactaaacgacgtttcttttctgctgcaatactcgatagacggtggcacggcatggtctccgatctgcgcaagaaaagaagcagatccgatctccgtcggcagctgcacgtccgaggggatttccgacggtgtgctcacaacaggtgaggacggcaaggttacgtttaacggtttgcaagttaaaaaccaaaatgtcaccgtcctataccgcatcacggaagtgcgcaccaaaaacggctttcagcttttgggcgagccgctgtttgaaggcagtttgccgcaggacgtaaacggcaccccgcagcaggatattacgatcaccgccgtcaacgggcagcaatttgagcttcccgccgcgggcagaaacgggatgcaatctgccgcaaccggtatggttttcgccgtgatcggtttattcggtcttctgtatgttcaaaaagaaaagttttgaaaggacaacgctatgaaaacaaaacgactcataaaactcggcgcggtgctctccgccgcactggttttactctccggcatcctatcggtttcggcggcttctgttccgcaggccgtgattgacaccggcagaaaagcatccgtatcgctttataaatacgatttcacctccgcgcacgcagacggtgttctgggagacaacacgtacatttcaaccggctatgccgatgagaacgtggaaaacactttgatgccgtatgccatcgaaggcgttgtattcagctatgccaaaatcgccgatcttgcggtacatgccgaaacaaaagacggcgaacatcaaaatatgctgctgtataaattgccgggcggcgacaaaaccaccgcgcttatgaattgccttgatctcacttccgaaaacgcctacaaaaccgaccgcggcgacttgtatttcacttcggataccttgattgatgcgctttccaatcatctgaacacagcagaaagccggacgaaaaacgcactggaagcttttatccgccaaaacggcacttctatgccggaaacggacagcacagggcacacctcagccgcggaactcgagcagggattatacgccggtatacggcgacatcggcaacccgaacgaagtcaccttaacgtggtcgcgcaccaacacggcgtattcggacactttaacggacgactgccatttctacgtgtacggattaaacctcttaaagctgttctcggataacctcggcgattattccaaggtacagttcaagctctacaacacgaccgacggttattgggtaaccgcaaattccgatgataacggtaattacctcgtcagcggacatgccgaaagggaagacgacgcttccgttttgacccccggcagttccgggcatcttttcttaaaaggtcttgaagacgacatctaccgcgtgacggagatcaacacggatgcaaattacacgctgctcggaaatttcatcaccatggaaatccgcgcaaaagagtctggcaagatctgcggcacctgcggaaagagcgagctgactgccgaagcgtttgaaaacgacaatgccaaagacatgaacgacgataacggttctgcttccgccattgtgccgattcatgtgatgaacacgcgcgggtatcgcctgccgaaaaccggcgatgccggcacaacacttcttgcagctggcggcataaccctcgccgtgctcagtgccgcagcggttattttgcttctggttttcaaaaaaaagataagtttgacgattaaaaaagcataacaagcgagcccgcctgtgttgaagcttacaggcgggctccgttttattaaggagacttttatgcacaaaaagcgaattttgctgcacgttctttttcttgttcttttcctcatcggcatcggggcagccgcatacccggcgttcgggaactggtataccgagcaaaaacgatccgttgtcctgaccgagtacgaaaaggcacttgcaaaaatagaggatgccgatctgaccgacgcattcaagcaagccgaaatctataacgatgccctttttaccggcgagattgatgagaaagaacgcccggactacggcgaacttctctgcacgaccgaagacggcatcatgggctatgtggagatcccagccattcaaattcgcctgccgatctaccacggctgcacggaaaacgaactcagcaaaggtgcagggcacctgccgagttcgtctctgcccgtcggcggaaaaagcacgcacgccgttttagctgcacactccggcagagcagattctaaaatgttcaccgatttggatcaggtcaaagaaggtgatctggtctatctttacgtgctgaataaaactttgacgtatgaggtagacaaaatcacggtcacaacacccgatgacaccgacgccattcagatcatcgacggcgaagaccttctgacgctgctgacctgcacgccatacggcacgaatacgcaccgcctgcttgtgcgcgggcatcgaattttccccgacgaaacgctctccacttctaaaccgtcagaagcaaagcccgagcaccccgacacggctgttcaccgatccacatggacgaacgagtaccgaaacgggcttacggaaggattgctttttgctctgctcattctcttaatatccgtgtttctgtacggcattatccgcctgaaagccaagcgctcctgattttctatgaaagagatcaatctgcgggaatattacccggagctttacaccgaagactctgtaatttcggtctcggatgaaatcgcggagatgatgcgccgctccatattagaagaaaaggcgtatcagcgccgcttatgtcgatatcaggcctactactctttagattacgccctgaccgcggaaaatgaaagagatttgctcgacgacgaagcacccgaagacctgcaggagcaaaaggagcgccgacgaaaactgcaaaaagcattccgaacgctcaccccatcccagcagcggcgcatctataaaaggtactttctttgtatgagctatgtggaaatctcccagtccgaaggatgcacgatttctgccgtttgcaacagcatccaccgcagcctcaaaaaattgaaaaagaattacgatctataaatccatgctaaaaaattccgtcacagctttcactgcggcggaattttttatatacggtatcattgccgtgtacgcgttcattccatgccgcaatcatcgcttcattcatggcgtctacatcgggatatggccgctcgcacatctctacaacattagcatggccgaagtgcgtatcggcagtataatagatcatagttgctccgcctcctatcgtttgaccaccatcacaagggaggaagcatctgcaataaggtgctaattacaccagatgatcttcattaaccagaggaatacccatgctttcctttgcaatctccaaaaacatctttattgaatataccaaaataacattctacgtatgcccttatgataatctcgtttatattatatatttcgtagtttttgcaaaaagtcgttttaaaaagttttactttgttgcaaaaagtcgtccgaaaaagtttgcgattcataatcaaagtccattgaaaaagttcacgatttgtgatatgctatgcgcaaagttaggaaaacgattcggagggagccgcgatgttaaaacgaaaaatagaaaagcgtttgactgaatggaaaaacacaccgagacactaaccattgatcattaaaggatgcagacagtgcggaaaaaccttttccgtgctggagtttgctaagaaaaattataagcatgtggtctatctgaatttcttcgagaatccggactatgcttccgtttttgcggggtctctggacattgacaacatcgtcatgctgctttctgcgctgcttgggaaagaggcagattttgagaccggagagaccgttctggtgttggacgagatacaggattgccccgaggcccgaaccgcattgaaattctttcggatcgacagtcggtacgatgtgatcggcaccggctctctgctcggcgtaaaaggctatggtaaggagccgaaatcagttcccgtaggttcggaaaccgtaattgatatgtatccgctagattttgaggaattcctgtgggcaaacgggatctccgagccggtcattaatatgttgcaaaaagcattggatacggaaacgccggtgccggacgcattacacagccgcatgaagcagctcctgctgcaatatgccgtcgtcggtggaatgccggatgcggtacagacttttgtggacagcaagcagatgaacgaagtgctgcgtatccagcgtgacatcgtgcgttcttatgattagcgcctattaggaaaacacactgtcaaaggggtttgtagcgggggttagcccgctactgcggtatcttccgtagtgttaatttcaatgtactctgcaatcttgtggagctcgtcagcaaatttgaatttcacgctgatattgccgttttcatagaccttgatatagtccacaagctcaaccaagatttcccgattgagggcctcaatgttttgatacttcataaaggctaccagtgcgggatgctcgttgtctacatcgtttgccagttctgcgcgttcagcgttcagccgggtaagcactgcggaaatatcagaagtctgccgttcatagtcggctttcatatcccggtattcctgctgggtgatttcaccatctttccagtcctgataaagagattgcttgtagcgtgttatctttgtcagttcccgctcttttgcagctatcagatcgtccagtcggtaagactggctttttttgattggagcggaattgatctgcgtgacgatttccgagtaggaaacagccaaatgtacctgatgctgtacagcgaacaaaacagcagcctccagccgttcatgcttgattgagtgcatggtgcaggctgtccgggaacggttcttgtaggttgagcaagaataatatacattgttgttcttgccaacgcatcgggtaatggcccgcccgcaatcggcacatttcagaaagccgctgaataaatgtacctcacggcctttcggggaagtacgggtatcacgctgtaagagagcctgtaccttgtcgaaagtttcatagtcgataatggcctcatgcgttccagccacttccacccattcctcgcggggaacagcttcaatctggtgtaccttgtagcttttcacccggctccggccttgggctaaatccccggtgtaggtcggattggtaagaatggagtggatcatgcgggctccccacataggatcgtcataccctcttgtcgaaacaggcaagcccttttgtaccttgtaagccgaggggctcggtacgccgtgttcgttcaggtacaatgcgatagcacgttttgatgacccttgaataagcattgtgaaaatgagtttgacattttcagcagcatcgggatcaacaatcagcctgtgcttgtccttttggtgctttacatagccgtaaggagcaaatgctccgatatactggccgttgcgccgtttgtaatcaaatacctgccggatctttttggaagtctgatagcagtaattatcgttcatcacgtttgtaatgggaacgatgatatttgaaacgctgtcggggttcttgtagctgtccacattctcagcaaggctgataaagcgaacacccatttgaacaaacaggttatcgatcaaacttccggcatcgctataatttcgtgcgaagcgggacaggtcttttactataacgcagttgattttaccactcatgacatccgccaagagccgttgaaaatcttcacggttggcgtccgttccagtatgaccatcatccacatattccgtgatgctttcaaactcgtcaatgttgcgtcggtaaaaatcgttcagtaggtcacgctggttctttacgctgttgctatcgtcttttccttttttcaaatcttcctttgaaagccggatatagatgcccagccgccagcggctgattgtgtaagagggagagaaactctgctgataccctctgttttttgctcgtgccattgttcctccttccctatcacattacacttatattataactctgtccgaggaggacaacaaggatgcctccgcttcgggacactttgtctcgaagaagcaaaacgagctgtaaccgaagttacagcccgcttctttgccgcagcaggaaatccgtcagcttatcttggagagatggcccgctttcagcaaattcaattttcacgccaacaccaccgatgcaaaagcagtatggatttttgacagtctgcaaaaatcgagtgatgcgctcctttcgggaaagcgcattgtcaaaggtcataccgctcacatcaggcagggactcggcagccaccgcgccaatgtcaacgcttctcatttgttcaagttcctgtgtagttaatttcacggtaaacctccttcgcagattgatagaacgcctctcgctgtttgctggggaaacgcaacaggccagcaccaccgggatgctggcctattgccttactccaccttgggacactttgtctcgaggtttattatagtttttgaatattagagagcgccgcacatatttacttgacctgtccaaagacaatctttattttctgtgcggcgctctcaacgcaagtaaagcgacaagcccggaggaacaggcagccagtctgttcagcgccggatcatggccttgggctggctgggcccatttacagtgctgatgttgttcgctcaatctctttgggaagatgtcaacgcgcacccaccgtctggctccccgtacttactcagggttgccgttattcccttgcgttaggaagaaaacctcctctcataaaccgagacattttttcatcaattccaagtgggttaagatgaaaaaatcaaaaagtttttttcatgcgttcaaggccacgcttgatcgactggcgaatagactcctcatgtacgccctcggccttggcaatttctttaatcgacttgccaagaataatatgtgcgtcaattctgcggccctggatctccggcagagaattgagagcgttccacagacgaagaaaggtttccatccgttcaaggagctcctgcggggtcggctcatgcaggcaagcggaatactcaatcccgtcatcgcagtccaaagaatactgcgccttgtgccgggagagccgccgctggtaggccatctcatagcgggcatcggccttgaatacttcggccacctcgtcagaaacttcgataagctgatcctgcgtgtaccaataataaaaatctttcaaattgatagtagtcatcgtaaaatcctccatttcagtttgttcggggttggtcggaaacgaaatggagcaacggcggagaacggcaccgcacctcgggacactttgtctcgaagtctggaaagcaaaatgcgcctgtgcgacacaaggccgcacaagcgcacgaaaaagtattatcggttatgtactgtttaatttcatgttcaaaaccggactgctccgacggaggggctacgctttttttaattggtgcagatcatggatactgcgaaataaaaagaaggacacggaaaaataacctccaatcggctaccgtgtccctgcaagtcgtcataggtctgcaagcgcaaagaaacggcggctctgatttctcaaaaccgccgttaggataataacttaaaataggcgcgcaaaatcacctgcctcagccagcggtttttttctttccccgtagtcggggcaggttcatgcgctatgcaattattcttctttagcttctatcaagccgatattttttgctctgcgttccacatagcagcatattttccgcctttcgcaagcaattcctcatgggttccagattcagcaatcctgccatcacccattacaaggatttgatcagcgtttttgacaatggaaagggtatgagcaatcattaccactgtctttttttcttttagcagattggcgatggcctgctttacggcaagctcattttcaatgtcaagagatgctgttgcttcatccaaaagcaggatggggctatttttcaggatggcgcgggctattgaaattcgctgacgctcaccgccagagagaagatttccattctcgccagtcggcgtatcgtatcccttttccatcttacggatgaagctgtcacagttagcctcccggcaggcagcctcgatttccgtgtccgtagcattaggacgagcgtgtcggatattatcccggatggtatcgtcaaaaagaaatatgtcctggtctaccatagaaacttgctccagtacacgctctgcggcaacatggttaatgggtttaccgccaatagaaatcgtcccgcccgttgcttcataatattttgcaatcaggttcaaaatagtagattttccggagccagagtctccgacaatggccgtgagcttttgatctggcaccgtaaaggtggcgtgttttagtaccggttcaccgggaacatatgcaaaatctacattgtcaaatgtgatttcatgggtagctgtgtgaagcggctccatgctgccagtttcctccggctcattcattacactcaagattttgtttttcgagatcatcaggttcttataactggtaaggtctacaaaaatcgagttagccagctttgcacagaacaggggcagcatacaaatcaaaaggtagtccaccgtgttcagtgtccctgcgacccagggtgcataggccagcaagataaccagcgggcaggacagccaactcaaaataccaaaggccgcaccaataggaagcacttttgattcgtacacaaagctgatccgggaaaactcccgcatggcgttgataacagttttgttcttcataccgcctacaccataagctcggaaagtctgaataccagaaacatactcaacaatgctgctgacgttctccgcacaaatatcgttcttttcttttccatatttccgtaccatgcggaaagaaagccatagaccggggattaaaagaagatcggctatcagcaggataattcctgtcggaacatagagcgtcataacaaagacaatcaacatcaatgacagggcaaaattctttgcaaaatctccgactttatgggtcaggattttttcgtagttgtttacgtcgcttgtaatggtgttgatataatctccggtctgcccctgcgtaaagcgggacagtgggatgcgtttcaaatggtcacccataaaaagccgaatattcttactgacctccgcaccgccaatctgcgctttggtataaccgtagctgtaaatcaggatacggagaagaaaaaccactgcaataataccggtcagagccagaacgcggttcatgtcaaattgacccgaccacaaaaactgcataacagagtaaagcagcataaacaggctgccggagagaagcccttccagaacagtcccaccaacgccaatataaaaattacggttctttttcaatacatcatgctcactcatgctgctcgcctccctccaactgataagtaatattccgggctgtttcgtagtcctcccacgccttccgatagtaagcattgttctttcggacttcctcatgggttccgacacaggtaattgtgtgattttcaaccactgctacacgctcgcacatcttcaacgcgctcaaacgatgggctaccacaatgacagtctttcccttacagagattttgaatggctttgtcaatctccatctgattttccgggtcagaggcacttgtggcctcgtccaaaatcaagataggtgcatttttcagaattgcgcgggcaatcgcaatccgctgtttttcaccgccggagaagcgggagccgaaactgcccacttttgtgtcatatccatccggcagggacatgataaagtcatcaatctgtgcctcttttgcggcagcccgcacttcttccagagtagcgttactacccatacggatattttccagcacgctgtcacgggtgaggaaggtcttttgaaatacgatagctatatttttcagaatggtatcgtagtcaagctccttgacatttttgccgccaatcagcacttctccttcctgcacatcgtagaaccgggaaatcagttcaatcacagtgcttttaccggcaccagatcggcccacaagagccatgcgctcaccatcattgattttgaggttgacaccatgcagtacatcggttttgccgtcataggaaaatcggacattgcgaagttcaatatcgtgattttggggaaagtccgttccaccctcataaatcggaatatccaggatttctttggtcttggtaacagcgttcagtacattagcaaaattagtccccagttcttgcagggggcggatttccgtcagatacatggaacctacatagacgaacagcaaaaatgcgctggccgccagtgagcctttgaggaaaaacattccgccgattggaaccatcagcaacatcccacattcgatgataacaacaaaggccgcataaggtggccccatgcgccgggaagtttcattccacatggcgttttcttcctggatagcgtctgaaaacttttgaaacgatttgctccccatgttataggctttaatcaatttcattccgccgatatattcgatcataacagaatttagtgtggtaatggattggttggcccgttccatcaaatcatcggtattgcggaacatcatccccattacaacaacagcaaggatcagcggaaccagggaaatcaatgccagaggaatattgacggtcatcaggtaaataaagatgactaccggcccaaccagatagcacacaaggtcaggaaggttatgggccaggaacaactccagcttttcaatatcttcattcagaaccgtttttatatccccggtgcgccgttcattcaaggcccccaaaggcgctctggccatgtgttccgcaaccatgcagcgcactttgaacagtgcgccgtatgcgcctttatgggctgccacgccggaacagccgaataatgcaaaacgcagggtaacagcggcggcaatcattgccacagtctgtaccacaagttcttttgtgcaggcattgttaaatgtggcatccatcagcctgtaaatcccaatatacggaacaataatacaaagcccactgcacatggacagcaggattgccaggaacagccagattttctggcctccggcccaatggagcagcagtgctactctgttttcttttttctgcttcatagactacctctcctttccatctgaaacagagaacagctctctcaatttcgggagggcatccattgtaactggtacatcatcgggcatttctccctcgtcaaaatgcaggacacgtgagcaggtacggcagacaaattcaaaatcgtgggtgacaatgaaaatgacttttcccatattggataatcgccggatcaatcctgcaacctgcgtcatactgtcaaagtcaaggccgctggtcggttcatcaaatacaagcaagtctttcccacaaatcatgctgacagctacagctactcgttgcttttgaccgccggaaagcgtgtttggatgttgttctcgatatggggaaagtcccagttcttccaaagttgcatttaccagcgtttggtctggatttcggatgccaaaggaacattctgcttctacgctgtcagcgaaaagctcataattcacatcctgcatgaccatataagagcgttgcagcctttccttacgctcaatcggcttgctttcccacaaaaattgtccatcgcagtctttgtgaagcccacagagagcgcgagaaaatgtagtctttccggctccattgtggccgaccacgccaatcacttcaccctttcctgcggataagccaatatcatgcaaaatggttcgcttcttgtaacggagcgtcacattccgtagctctaataccgggataggggcaatcgagtggggtttaggtgggaacaccgcccgaagatcaactgcccgcaggcccatgcgttcacgctcctgttccgacagctgtcgaaattcttccggggtataaatccctttgatttctcctttttccagataaacaattcggtcggccagttccatcaggtagtacagccggtgttctgctatcaaaaccgttttgccctgcttttttatcagccgcaaatgctctctcaactcctgaatggaagtcatatccaaattggaggacggttcatccagcaaataaatctgtgggttcatggcataaacagaagcgaaggcgattttctgcttttcaccgccggacaactcaaaaatattccggttccgcagcttttgaatacgcagatcgtcggctgtctgttccactcgctctatcagctcttgtggaggacgagcctcgttctcaattccaaaggcaatctcgctgtctgtatcaacattgaaaaactgcgtccgtggattttggaaaacggagccaaccttagcggcaatctgatacatagggatattgctgatttcctgaccatctaccagcacacggccatgaagctctccctgataaaactgaggtatcagtccattcaccagccttgtaatcgttgtttttccgcacccgctgcggccacagaacaggacgcattctccgtccgaaattttcaaattgatgtcatgcagcccaccatgttcctgccccgtataggaaaacgatacattttcaaactcaatcaaccaatcacacctccccgcacacataattcaaaaatcagataagctacggcaacggccatgacaccccaatcggcaactccgcattttatctggacaagacaggtgcgtggattgggattttcaattccacgggtgacagaagcaacagaaagatcatccgctgcttttgaagctgccatcaacaaaggcacataaatacactcaaccgtcatgcccggatgtgctaaaaagcccgccagagaaggtgaaacatctctcatccgcatagcgtccttgatatatcgccagtcctcttgaatagttggaatgtaccgcagcataactgccataggaattactaactttttgggtgcgtggacacggttcatagcagacaggaactcattgacttttgtagtagtcagaacaatcccagccaaggttccgcacgcatagaccttatgaaacaatcctaaaaaggcaataaacattgtccgcagcgtgcctgtcatttctgccatgatccaaactgtcaggacacagatgaccgcataaaagcatacagccttaatgacatatttccactttccaaagaaagcacccaatatcgcaatcagcataacaaggacaaattgatatgcaagtgaaggagcgaacatggacgataaaacacatataagaataagaaagagcttggcccgtgggtcgagccaaagccctttcttgtggcgtttaccgctcatgctgtaatacctgctttttcaaactgctttttcagcattttgcagcctacaaaagcgctgattgcagatgtaatgataacagcagcgaacatggcaatcaggatgccggtatttgcagttgcctgcatggtgtcgatgtagctctgttcagttccgtttcccagcatagtctgtgcccagccgttggggtcaacaaagaacacgatatacgaaccagtgccgccgagagagaacaggatataagacaggctgttgagttttttgcttttgtactgccctgcaccagcaacgaagtccgcgacaatcgccatgatcaggtagcccaatgcaaaagcccagtgcataccggtcacgaaccaaataatacccatgataatgcccgttatagaaaggctccaacgcttatgtacttttgcaatcagcaaaagataaatggggccagcaagcagcccacctcctgctggcatgaaaaaagtaagtacaggattcgttgcaaaaaagacaccgcccaccaatacaaaaacaaataacagtgcagtaaaaatacctgttgttacaaggtctttcactgtcagacctttgttcatagaatttacttgattactcattttgacctcctacctttcattgtcttgactcgacaaatggtttgtgatattctgcagttagatagttctaaccactgtctaatacaatacgcatttatcgaacaacattcaataggtcccggcgatgttcgtctgttcctttcaaaagctcgtctaatcgttgcaaaaaggaggcggtctgttttcatgtgtgaaattattgaccagttttatacaccgttgctgattgaacacggttttatccatgacccagacaaccagcaatatggggcattaggtgactgctggaaactttctcccgaagttggagaaggcacctactggacttatggacagaaagacttgtatgatattaaaatccataacttttccttccacgaagatttcatgttggaatgctccatgccggaatgtctgagtatcactcggtatgactctatttccggggaggaattatctccataccgtagactgtctgccggttatatcaaaacatttattggaggctacgctccatacaaggctttgatacataaaaatattccaatccgttcggttgggattgagattgcaccggcatattatgaggactacctgaaaaaactgtacccagaggcacagatcaatcctgtggatgcatttcggaagatcgaccaaacttccgactttccagaaatgtcacggttactcacagaaatcaaggactatcgtggggaagggattgccgcaaaacttttttatgagggaaaagttgcagaagcagtttcaatggtagtggaatatcagaagaaacatcctgataaaccagcccataagctctctcaacaggatattgaaaatcttcaaatagttgccgcttatcttagcgaccactatgcttttgatattcctctggaacggctaacacagattgcctgcatgggaacaacaaagctcaaaagctgttttaagaaatactacgactgcaccatcacagagtatgttcagcagaggcgtatgagccaagcagaatatctgctggcatacacagagttgacagtagggcaagttgcccaaacagtaggttattccacttcaagccgatttgcagaattattccgcaaaagcactggattgttaccattagagtacagaaaaaacgcacaacgaaagtaaaatgagcgccagagtttactctggcgctcgtctgattttgtgctgaattataaaatgtagtgaaattaaatagtcagtagtatgaaatagatagtcgttcaaataatatcacatgaaatgtaaaatcatatcaggtgatgttatgaagatagaacgagatgaaagacgctttgattttcacgatatagggctcgccatcaagcgggcaagagaagccagcggcatgacgcaggagcaactggcctatattgtcgaccgcgctccgcgtaccattatgtataacgaaaatgacggccagcatccaagcctcaacaccttttatcagatggtcacaatgtttgatatatcggtggatcaatacttttacccgtcccaaaatagcgggagcgagtgcagaaagcggattgatgccatgttgaacgccttggacgaaagagaattgaaaatcgttgaagctacaatccaagcgatgaaagcatcgaaagaaacggaggaaacgtaaaagaaagcgtaacctccgttttttgcgccatgttgcgggttgcgcgttttggcaagcaattcgggtgtggccacactccgaaatttttgcagggcgcagggcccgcaaaaatgcttgttggggagctccccaaacccgctgtgcttcgggacaaattgtcccaaagtcccggtgcgttgcaccgtagtctgcggcccgtcactatcgttcctgggccttattttcacgctcgtctgttatgccgagcagatgatcaatgttcgcttttattgccacggcctcccgcatttgccgctgggcctcccggtattctgcataaagcgctttcttttgtcccgccagctcacggcgggatttttttagtgcttcaatcttagggagttttgcgccgttcagtatggtgttcatagtatcctttgccgcccggtaagtggcaagctccgcttcgtgctgggccagatactttttgctgtaccgcgcagctttgtatccatcaaacaccgggcgagtcttggcatagtccaccgtggcagccatcagctccgaggttttggaaatagcctcctccgttgtgcggagctcgtcagacagcttgtgaaagtgatccaccgcagcctcggtgctggccgtcagtgccgcatagtctgtcagatgatgctcctgcaaatactggagcgcggcggccatttgttttaggttgtagaccttggcccatcgttcataggccgggcccttgccttgggccatacgctcttgaatgtcgatgatgagattaactcgccgtggcggaaccgtgggctcctcgggcagttcggggagtggacgttccccggcaattaccgccttgatgtcctccgggtcaaatccaactccaagtgtagaagcccggagccgggtcggtttttcctgcccgggtgcaaggaatgagatgacaccgccctgcccatgtttcaccgcaaagccggactcctccatgagacgaagaaagtcggcaaagtccgtgggctttttctccaaagcggcgagaacagccagccgcacccgctgcttggcagagggtggcttttctccgatccactgtccatagtggagaaaacgacccttgctgtgctggcacggattttggataacagacaattcatgttcgatgcacacgcggtcagagagccgccgcagggcaaaggacgaaccaatgaaattatgaaatttccgggagcggtcaaaggccgtcgcattgaaataaatgtgattgtggatatgggccttgtcggtatgcgtacagacgaagaactgatactttccctttgtccagcgcatcgccgtttcatagccgatacggtttgcttcttccgccgtaacctccccgggcaggaacgcctgccggatctgaaagaacagggccccgcgagacacggcccggcctgtctctgcaaggtattgactttttaccagaagaaactcggcgggagccgtgttcggatcgcagagataggaagatacggctcccagcttttccgggttcaggccataggtgaaacgatcctccatcgtttgaattgcactttttcccgccgctgttttataagggcggatgtaggttgtcgccgtagaaatccctccttccggcaaatagtatttttactttgggacactttgtcccgaagtagaaaaaaccggggagcggtatcaaccactccccggacgggtcagagctctaccagcgcggagagctgtttcaagagatcagacagcggcccccacaacgcggcatagtcccgctgtaaggctgcgagttcttcgggataaattgcgccgtaggtgttggcctgaattgccacttggttcagattgttggagcatcgccgctgaagcgaaaccagctcacgaacaggcgaaaggtcaacatgaagcacatacccactcagggccattttccgcatataagctcccatgttacggatgccagcctccgccatacgttcttgaatcagggcctgctccgcctccgacaccatcacatgaagatggatcggacggcggcgtttctttgtcatcgctcctcacgctcccggctgcggcaggcgcggggcggctcctttactttatccagcggcttttcctgttcgtctaccggaacagggcgcggcaaatgaaattcacggtgcaggcgcagcgcctccagtacagacaaatcctgttcacgtttcttttccatatacgcacctccttatctatcaccacggtcaggctgcctgcgctggggagccggagcctccgagccgcgatctgcctccgccaactttgccgcgtttttcatctgttcggcaatcggacggggcctgtcgggattatcaggcgcaggacgcaactcatagtcggatgcctgcttttccgtcagcggacgggtataggtaagatagccccaagccaagaacgagccattttccaccgggatgcgctgatcgtaattgaagatttcatccggcttgttatagggcggcttcgggaatgtcccgatgtccacaggccgctgggtcgaataatacttgtaaagaccgggagcctcggtctgcctgatccccacgttataaatacgctgatagtcctgcacccggtctgcaaaattcctgttccatcgcggcacggtcatttccatagtgaccccattcgtactgccgctggccgtccttgtcatcatagcaggcccatgtgacatagcgggatggcgcggtgggatgttcgcccaatgcaaatccacgtccattttccagcataacagccttcagaatcgaatagccttgatttttgtccatagtacacctcccatcatcgagacatttctttgttttctcttttcacaaacggctggagctgataggggcttgtaccgtcctcgggccgtagaaagtctatccgggccgcagcacggatagcgttctggttaagctgccgctgccatgccccttggctgggagcccacttaaagccgttgcttttcagttcctgccgctgatcggcatcgggcttttcctcgaaaataagctgcaaacggttttcagcctcgttgattttggcctcgcctccggggaatgtccagccagcaaactcggagcggctgctcagttcctcaatgcgctggcgtacacggcggatgttggcgttgttgttggaaagcagataggcggggtacggcttgcttttatccaagtgccatgactgcgccatatctgctttgagcttttctgcctgctccggcgtaagctccgggcagccgtccagcgttttgtgtttccgaaaatacgcattgaccgccttcatagtggcttgctgggactccagcccctccagcttttttgtcagcttttccacggccagatcatcgtcggcgctgatcccgcccataccaacagagcggattttatcaagcagctttgaaatctccgcatactctccatagttgcgatcccgggcggcgttctgcttgtgcttttttgccacagggaaattgccgcccccggagatcagaatagagggcacccgggcatcaatcacattgcgttcattcagattttccgcaagtttccgggcatagcgatccaccagcgcgtcaatcttatcatggtacatgggatcgacacgggctttctggcgttccgccgctgcatacgcttcatcgaccattgcccggtagcccgccgtagcggagcccggctgatagtcagaaaagctgttcatatcttttgcccgctttgcggcttcttcattgatcggataatatttcggcatagtacctccttccacaaaagccggaactttgggacaaattgtcccaaagccccggcagctaaaatgttgacagcatctcacgaaaacaggggcggacgtagaaacatacgcctcccgcagaaaagggccttaaaaagccttgtcacaggcgggtttggggtgtcctaattgtcaacacatcagccccgcttttttcgcatatattcccgctgctgtctgcggtgtgccgtctttgcacaggccgccgaacaataggtttgccgtccatcaggagccacggctctgccgcataccgggcaagtcttgaaatccggccttggcccctctgtcagcaacgcagcctccagcgccggatcaaggggcagaactgcctcgcggaagtagcggcaataagcccccgtccagcattttccaaacatatagcactcgcaatccagcggcaggcagccgcagtcccggtcatagttggcacaccattttgacaccagcctgcggattgccgctttttctgtccgggtcagttctcggcccacagcatcacctcccgttgcccggtggtttgagctgctcccggtagcagaacacgcagccaatcccgcgccagtaagggcagccgtcacaacgggagcccttcggcggcaggctgggcggcatacccttaaagtagcttttttctttcataaatccctcataggggttatttgtaaatctcattcattatcctcgctttcggtatcgtcctcgtcccaaggcggcccatcgtcctcggaatcgtcataatcagccagttcctcactgtaatcttcttcgggtacagcagctttttcatgcttcgggcggtaaattttgaagtaccagcctgcaccgccacccagaacagccactgccaaaatcagcagaagcgtcccggtattgcttttctgctggggctcgggttccggctcctccgcaggttccgtcaccggagcgggttcgggagctgtgccagcacactcggtcatgttgaccgcgcagacctcgcaatccgtatggatggctccgggcgcacatttttctgtgcaggagcaggccggaagttctccgccagcggcctccagtgccgccagcagatcggcttcatccaccatgttcaaaaagtaggtgtgatactgttcgccgtcctcgtccacaggcttgtcatagtcaatgacaatgtaaaaggtgttgccgccgctggtttccaccgtgatgaactgtttgttggttgcggcatcgtagagcagatcgcgggtcacaaggtttccatccaccgaaaagccctcgcccggggtaatggtaggcgctggctccggggccggagtttcttccacaacaggcggttcctcattcccgccgtccgaataggcataggccgggattgcaaagccgcataaaagaacggcggagcaaagccccgccgccaacatacgaaagtgtttcatattcagttttcctccttttcttcttcggacttcgggacactttgtcccaaagtacctccatccttcagcttttcaaacagcagcgggagctccgtaagggaaatgctcataccgcgcacaatgtccacgatctcgctgttttccgcctccagctttttctgctccagctccttgagccgggcctgctgttcactgattttggccttgaccttatcaatctcggcctgaattttcatgcttttggtagttgccatttcaaaacctcctgtcacggtaaacgcccgtaggcgtaaaaatgagattgccagtagcttgtattcaaatttgcgtagccgatgggatctccgcaatgcagcatttttccatcaccgacataaatcccgcaatggctcacgcccggcgtgtcataggtgcctttgaagaacaccagatcaccgggtttgggagaactggtcggcgtacagatgttatagagcccctgggctcccagcctgcccacattccagccggagtgattgataacccacgaaacgtagccagagcaatcaaaggaagtggcaggagaactgcctccccacacatagggatagccgatgtatttctgcgcttcagcaagcattgcagcaaaggtttcatcgtccagatattctccgggcacttcgtaatcaccgggtttcccggtaatgtacttgttcacatatggagaatccgggaacagatcggggcggtttcccagcgttgccatatagatggcataccgtgaaagctgctcctcgcccatgatatatacgggcacatgggataaatcaaagttctccagcgtgaccgtacagatgtaatagtcgtaaggcacctgataggtgtccgtatgggagttgccgtcctcgtccgtccatgtgtcggtttccgtgcgataccgggtttccaccaccacatcctcggtcaaaatgtactggcggtcaaagagcatttgcaacgttccctgtacctcgcctattgtccattgtccctcatggagcgcacacaaaagagaaagcagcacatagggatcatgttcgatttcgtccagatcgaagtggtattcgtcatagtcatgggtgctttcataggtgtccagataatgctgtaaatcatcttccaacgcacaataggcggcttcggcggccagcatatcacgatcctcgcaaggataggtgctggcccctaatgcaccggccccggcgttccccagcataagcatggtagaggaacaggactgcatagcaaacaggagtaacacacagagcaccgcaaccacggcacctgcgggatgacttttgacaaattccactgcccgggcagtcaggcgttctgtggctgtggcagttttcccagccgcagccgcgctctgctttgcagcctcctttgcctgcttgcggtattgcctgcggagccgttgcttctgccagtagcgggtaagggcatttttcgtcagctccgggtgctcctgtgcggcggtgtgaaaatggtagtccgccgtgtacttggtatagcgggcctcggccttgcgtaccacttttgccggatgttcccggactttacggcgcacaaagcgagagctatgccgtagcgcggtttctcccacaagctcagaacggtgtgcgccttctgtaccgacattttcctgttccacttcaaaaatcttgccatgcacgaagctgtgaacggaaccactggcaacacggcctatgcgttttaccgggccgggctttttcggcggcttttgttttgccagcttctcccgggcctgttccagcttttcgccttgggactccatacggagctttgccgccgcagcctgttcctgctggctctttttgcggaacttggacttcgggacactttgtcccgaagtgtcggaagcctccggcccgggctgttccccgtcaggggcgtgggcggtctgcgaccaagccccctccttggtcttattcgtttttcgtttcattcttcatatcctccgggcgggtagtcagcaggtcatagatttctccgcgagggaaccgatccacaaacgggatggtcacatttccatagaacaacaggccctcgccggaattgctgtgtgtgatataggaaagctggtgctcggaaatgccgagctgttttgccagaatggtacggtcactctgcgcctgcgaaagcaggatcataaaatccgtgttgtccagaatgttctcgatttcccggctggccaaaaggtctttgacgttctgcgtcaaagcagacggcacacatccttttttacgcagcatcttccagaccgccacaaagtagctggccgtcagcggatctcggagcagaatgtgaaactcgtcaaaatagcaccaagtcgctgcgccctcgtggaagttctgatccaccgcctgcgaaacaaactcgtttgtgatgtgcattgcaatctttctaagattttcgcccatgtttttcagaacgatgcacaccacacggctgtccgtcttgacattggtaggatggttaaagagattgagggagcctgtgcaataaagctctaaggcagttgccacgcgccgggcctcgggctccggctggcgtaaaagctcctcatacaaatcctgcaacagcggtgtttttgcggtttccaatccgagcgcctgctcccggtacaccaaacgcacgcagcggtcaatgaccgtcttttcaatgggctgcaagccttccttgccgccgaccaccagctcgcatagggacaaaagaaaatccgctttcatggaaagcgggctttctccggcggccatattgagctccacatccatcggattgaggtggtgcgggctgtccggggcaatctcgatcacctggccgcccagccttcgcaccagtggagcgtattcgcccatcgggtcaaccacgatgatccgatcctgcgggatggtgagaaacacattcaagagctcgcgctttgcggcaaagctcttgccggagcccgtagagcccaaatacatcccgtttgccgatttcagctttttgcggtcagccatgatgacattgtgagaaagtgcgttcatgccatagtagagggcctgccccgccatgcggagctcccttgtcataaaggggataaagatggctgtggagctggttgtcataccgcgctggatttctacctcgttgtaaccaagggccaacgaggaaacaaagccctgttcctgttgccagtccagacggcgtagagcgcagttgtatttctgcgcgatgccgcccacggtaaacacatcgttttccagccgctggcgagtaggggcaaggtttaccaccgtaaaggtcagcagaaacattcgctcattgcgggattgcaaatcagccagaagctccgctgcgtccttgctgaatgtaatcaggtcagggggaagaatatccgggtcatagccggagcgcacagcctttctctgttcctccactttcatttttccgatgtccgagattttccctttgatggtcttaattgccttgagctgatccacggtctgaatgtgcatggtcacggtcatttccgcatccagctctaagatttccgccagcaacttatccgaaagctccgatgccataatctgcaagtaggacaccgcgccccaatactggccgatgcggaatgtgcgggactggcggaagtcgagactgtccggggcaataaagtcttttgtgccgagcccggtctgcgggatgtctttccacgaaaagcggaacgcctcacggctccccgggtgcatctggctatgaagcagcgcaaggcgggcccgtccgtccatcggctccgagggaacgcccagccgcttaaagtttcccatgacatcggcctccacacgctccagacggggccgtgcctccgcaatcccctcggcgggtatgccaaaggtgatgtattttgagcgctcaataccgttgttgcttttggcaatctgatttttcagcatcccggtaaactcgttccggacgctgttatagttgtcatccgctttcgggatattgacttgatagcggctgcgggaatgagaacggcggttgataaaggaaagctggaacggcagcgaactgtcaaagtagttgaggaatgagctccatccgctgaatatggcggtctgatcctcggtggatgccacggagtaattgatgtcctcatattccacggtttttgtatagagcccgcccgggagcttgcacacaccgtccgggtgcatggacagatacgggattgtctgttgggcagacagggtcgcccggcctttacccttggcggcggctccgtttttcttctttgtgtttttcaatcacatcctcctttccagcacccggcccggcaaagggcgcataaatgttttcggttcggtaggccctgatccccggccttagaaacttggcccggatgatgtttcgcacaaccttttcaaagggcaagccgtccttttcatacatcgccagcaggaacgccgggagcataattcccagcatgagaaacatcgccccggtattgccgagggtgccacgggtcagcagataagccggaatccccaccgcgcccgcgctgccgaagcagacaagctggcgtttggtgaggttgaaagccatctttgttttgattttggataaatcgtttggtacgtttacatagggcatagatcacactcctttctgcacttcgggacaatgtgtcccaaagtccgggatggttggtgttacttcattcccccatacagcccaaccgggcggggtctgcctggcaaagagctccacgcggggcagatcgcccatcagggaaataattttgtcgcgggcctcgtccggctttttgctgtgggcctcaatcggggaaacgataaattgatggatgttggcagcctgccgctttggatgtcccttggttgccagcagacagatttctgcattgccccttgtccagaagccaaggccgtaaaaccagctatccgccttcttgttctttttcagccagatgaaagcaacgcttttgtaggtgaagccccaagcctcgatcagccggagcgcctccgggagctgcgggaaagtggcccataaaaagagtgcgctgtccggggctgcaagattagccacaggcaacgcacataaatcctcaatgctcatagtgggataatgattttccgccgcgccctgtactttcttagccgagtagcgccaagggggatcggcgtaaatgatagaatactgctggataattacactcctttctcgccggagctttttactgcctgcgccgcacggatgcgctcactggcggcggcataaaaggacggggccgtttcaaagcatacaaagcggcgttctgtgttgatggctgcaatcgcggttgtgccggagccaacgcaaatgtccgcgaccagttctccgggacgggtgtaggtgcggatcaggtactcacaaagctccacaggcttctgtgtaggatggatgccgccggacaccgtaggcacaaatagtacatttccgggatagcggcggccatcgttggactccgattcctgccgttcaaatttcccatagttggagcttgtaccgcttcgggaatgtacgcgggcataaggcttgccataagtaaacttcggattgtagaccggggacttctggtaaaacaccaagatattctcggactttttcagtggagcccggtttgcattgagaaagcccgttccgcgctccttgtaccaaatccactcatagcggagcatggcgaggttggatgcgcccagcaccttgtcaaaggggcactgtgcgaaaaacagcactgcgccattcggcttgaccgcccatttcaccgcctcccacagttccgggagcggcaggggcacatcccaataattccgggttgtgccgtaaggcggatcagtcaacagcatatccacgctatgttttggcaaagaacgcaggccctcgatgccgtccatgagaaacaagtcctccttcgggacactttgtcccaaagtgcggctatcggtcattgcgggcctcctttgtcttggcaggcgcaggccgggcggcgttttcttttcccgcttgtttcgcggcctcggccatctgctccttgatcggggcaggccgtaccgcctgggcccgtgcaacaagctgttccaccgccgcatgatacgcctccacaccagccgcattgatccgttcctgtgtggctcggtcaggaatccgaaccgtagcccggtatcccgtccggctggcaggatcgggcttagagggagcgccgaggaaaatcccgttttttccgtccacaaccttaaaatcgtcgatgaccacaccgccaaaattgacgctggcgaagccgatcagttttccctgcggctcaatcgggcggacagataccgtgatcggaacaaccgcctcctgcaagacagcatctgtccgcatttttactgcctcatcaatgctaacgcccttgacttctgcaagctccgcgatgggagcatcaaacagccagcgccgttcctccgcagcaatctgctccggggtcagcaatacatcgtctttcttactcagataaaattcctcctttccgcttgccggagcaggctgggcggggtcgtccatcaactcttttctttgcaggacggcctctgtttccgccataaagcggtaagcgtctgcctcagtaaactcctccggcgtttttccattccataagcgcgttccgtctgccccgtatcttctcggcataagcaccacctcctgttaatgagcgccaaagatacgctgggcaatgctcccggtcttaaagagcatgaagcaaagcagaaccgtgtagcccacagttccccaaatcgccccaatgggatcgccgcctgttgcgatgccttgaatgagcactgcgtaaattgcaacacatacgaggatcagcagcccttgaaagcctacggcaaacagggacttgatgtagttctgcccggtgccgccaagctcccggttggaaagcgtagcaacggggatgggggccagactggtcagcagatagatttccaacatccggccatacaccaagacgaaaatgataatccccattgctttcatcgtgaagccgatgagcgcagactgcagccaaagccccaaaagcggccccaagtccatcgcctccagcgaggtttccagttcggcaagcatatccgccgaaacatcggtagagccttgaatcagcccgcctgcctgcgcgatgacgctctgcgagacatcgaacacggccatgacgatattgaatgtgtttgacaggatcaggattgcacaggctgttttgaacatccatttatagaggttcgcaacgtcaacctcgtgcatattgttcttttccaaaagcatctgtatgagctcataagtggcaacaaaggtcagcaccattccggcaatcggcaggatcaccgtttcggaaagctgtcggatcagggagaaaaccccggcgtgccacgccgccggggtagtccctacctgtgccgcaatctctccgacttgggtattgacagtatcaaaaagaccttcgaggttccccatgatcccgccaatcagaagctctttgagccagtttgtgagccagtcggtgagaaaatccataagcgcctaccttaaaacaggccagacagcagagggatcagtgtggtgccaatgacgatgatgccgccgcccgccatgagctgttttatccccaattaggtgtaaaactctgctcgatggcgggcggcggcgtacaaaaaatctatatggtgttgttaagagaaccgtcccggcgggacaggtcaggcagtgacctgttccacctccgggatgggtttgagattaaaatgaatttcgatagaaatgtgtcttgttttatcttcgtcaatgcgctcatgcacgacgatttctttgattaagcggttgagggtggctgcgtccagctctgtgatgttggcgtattcctgaatggcttccacccattgttttgcgtcattggcaagctggacttcatcgtacagccgctttctgccctcggacacttttgctttaagctccgtctgctcggtctgtgtcttttccagcatggtgttgaaattctgctcactgatacgccctgcaatcatatcctcataaagccgcatgaccattttgtccagaagctcaatccgtttctcgtcccttgtaagggatcgttccattgcttcccgctgttcccgctgctcggcttcacaggtattggtcaggcggtcagcaaccgcttccccgtccatcagggcagctctggcacattcccggattttccgcagcacatggctgtaaagggtgtcatagtcaatccggtgctgggtgcagtggttctttccaaaggcattgtaggtcttgcaggaataaatctgctggggatgttttgcgtttgtgtagcgtaccgtcagcgacttcccacactcgccgcattttaacaatccggcaaacaggctgatttcattagtctgccccggacgctggcgggatttcagcttgttctgcacaatgtcaaagctcatgcgatcaatcagcggttcatgctgtccttccactacaatccagtcctccggcttcttttccccaatcgtgccgattttgaaacggtagtcctttttctgggaagcaatcgccccagtgtaaacgggattcatcaaaaggtctttgataacggaaaagtcccacatataccgcccgttttccgggtctttcttttcccatttggtgcgggtattgcgaagcccccgttcccggttccaccatgtggggcaggggattttttcttcctccagccgtctgcggatatagttcggaccatgaccgtttagggcatatccgaaaatcagccgcacaatcggggcggtttcctcgtcaatgagcagatggtttttgtcctccgggtctttccgatacccaaacggggcaagacacccggtaaactgtcctttctgcgctttcagaagataagaggaatggactttcttggaaatatccttgctgtacatctcgttcaggatattcttgaacggggcgatgtcgttgttatcccgcagggtgtcgataccgtcattcatggcgatatagcggacaccgtttcttgggaaaaagtcctcaatcaaatgccctgtttgcaaatagttacgccccagtcggctgaggtctttcgtgatgacaaggttgatttgcctgcgctcaatggctctcaacattctctgtaaatcaggacgctccatattaagacctgtgaagccatcgtcctgatagactgccacaacctcccatccctgcttttcgcagtatttttccagcatatcacgctggtttgcgatactggcactttcgccttgcaggtcatcgtcctttgacagcctgcaatagaccgccgcacgatagcccccggcaagtgctgaaccgattgttctgtattccatttcattcatcatagccatttacccacacaatccagacggtatctggctctgttgaacctcatcttcattatacttcaaatctttctttttagcaagatattcttttgtatttgttttgccgtatttctgggaaatcaggctgacgaacacatcggtggcgtccagttccccgtcaaatacggttgtcacttcaatcttggtcttatttttcgccataggcagttatcctccatacatgaaaatagccagacagagaacggtcggcaacgaagtccggcaacgggcttcaaaagaccttgcaaacaatctcaatctggcgttgattactatttatacttttcttttatttttctgttgttttggttgtcagagagggaaaaagcccggaaataagggattttccccggcaaccggctcggcaacgggatagcaacgaagtcggcaacgggctgtcattttcagaatggaagctccatctgctctgtgacctccacaaaaccgtccatagatttttcgggcgggttgtcggtgtccgttgccgggatttcacgctcccagcccttttgtctgccgtattccgcaaacatcctcggattggaaaagtagttccacccggtaatgcactggttcattatctcgttgatttcccggatttcccattgcttcggctcatcaaaggtgtggtttaaggcttccttgtagagctgcttggagcagaccgtttccccggtgtacttatcaaggtaagcctgtatcatcccggctttggtgtcctccggcataaaatcccgctggtgttctttgagataccgctgcatggctgggctgaatgacagcttgaacatgccgcttcggtaaatctccattgcttccgcccacatctggctgatataggctctggaagcggcttcgtcctccaaaatgtgaacctcggcttgctccgggtacaccatgaccgggataaatcggcggttgccggaacggtcaagggggagaaagtcaagggcgttggaagtgccgccgaacacgcattgacgggggcggtctgccgggtgagtttcatagggaattttgtaaacctctttctggcggcttagaaaggacttgatttcctcaatgctcttggcattggcggttgccatcatttccgacatttcaattatccagtgaccttgcagcttgcggtacacgttatcatcgtccagcttccgcaaatcatcggaaaaccactcgtcccggactgccagcagccggaagaaggtggatttgccagccccctgaccgcctaccagacacagcatgatttcaaacttgcttccgggcttaaatgcccttgtaatcgcccccagcatgaacagcttcaaggcttcataggtgtaatcgtccacatcagctcccagaaagtgccgcagacagaagcggatgcgctcagtcccgtcccatgcaaggctgttcagaaaatcccggatggggtggtacttattctcattcgccacaatcccgatggcggtttcaatctttttctcactggtaagcccgtaggtttcttccagatagagaagcagatacttcatgtccgtatcgttcagggcggtgctttctctgtggaagccgatgggctttatgatgtccttgcggtcagttaggatgttgtatgcgatagccccggaaagcagagggtcacgctggaatacggtcaggcagttccggatgctctgacggacaccgcctttctcggtggtttccagccccgccttgatttcctcaatgctctggggcggctgcatggcgttcatggtgttttttagttcttgctgcgtctgcggctgcaagctctgccattcgctgttcaagctgtatcacatcctttccgtagtccgtaatcaaagccgctttttcctctgtctccccgaacagcagcacatccagcagatattccacatgggcttgcttctgtaaggcttccacaaaccggggatgaaaggcttcctccggggagtgcggggcgtagtccgttctccatgccataagcaagtgaagataatcggtaagaatacggaagcaacggttttttgcttcctgaaactgttcctccggggatttctgccggggcttgggcttttttgcctttcccggcggtttccagtcctcataggaaagcccgaagtcctgtgccagctgtacggcggcttctttctttcccagcccatacagggcggcggcaaaatcaatcacatccccatccgcaccgcagccgaagcagtggtaacgccgatccagcttcatgcttggggttttatcgttatggaacgggcagcaagccatcccgttccgacctacatggattccataatgctccgcagcctgtcttgttgtgacggactgcttcacagcttcaaatacattcaaatctatccctccttgaaaaaagaaaagcacctgacattctctgattgaaaatggcaagtgcctgttaaagttccatatcctgttgtctgtgtttcgtctgttcctgggcagttctttgtgcttttttctcgtctgccttatcctgcaagacttccttgatgggctgcttcttgggcggctctttgctttcctctgtgccgggggtggctttctgtacccagtagcggatatcccgcagcttcttcaaatcctcctgcacctctgtcagcggtactttcagctctgcgatttcgctgagaagtttttcctgctcctgttgcagttccttttgggtgctgtccttatcgtccgggtgcttggcaaggtaggcggcggctttcgcataccgggcgacctccgggtgttcctgtttgaatttctcctttgttttcttgaaaaatatcttctggtacttctcatagacaggcttacattccttgcagtctgtccggctggcaagaatcccgtcaatcactttgctgcgggcttcctttggcttcatctgattgcggtaatctgcggctgatttcccggaagattccagaaacgcttctaggtcctccacagtggaaagccccttttgccggagataggacagggcttcgctgactgcctttaagtcctgtgaagtcccccggttctgtccagccctcgtccagtccttccgttcttcctttcgtatctccatgtacttcatcagcagattgggaagaagtgtcgcttcctccgccgctttttgtgcaagcagctctttccgtttttctcccagctcggtaatccagcctttgaggttttggataagctgccggatggacttcatcagactgttggcggctctgatttcccggttcaggttgccgatattcgtctggatacctcgcttttccatctgccggacagcagctccctcatggacagtggggactatatcaagcccctgtctggcataggaacgcaagtccacacgctccgggcggtcattggcttccagataacggttctggatgacctcccattcatgccgccagatttcacaatacttctggtcgttccagtccaccgtatcctccttgtggcttttccatctgccggacggaagtttaatccgttccccattctcgtcaaggtcataaaccttgcggctcttgggaagccatttcccatgtttgtccattgcccgcatagtcaacaggacatgggcgtggggattgtgtcccggcgggtgggtgtcatggatggcaaagtcaacaatcattcctttggaaacaaactgctgttcacaaaactcccggacaaggacagcatactggtcgggcggtatctctttggggatggtaagcacccaccgccttgcaagctgagagttccactgcttctccaccgcttcggcggcgttccatagggtattgcggtctgcatactccggcggggcatttgccgggagcaggatttcattgtggacgataccacgcttttccgggtagtgcttctcttcctgatcgtattcacagaacagcttttcgccgctttggtaagcagcggcggcaaccgcagactgctgttggcttcgccgcacaatagaaatttcgttgtgtggacagggcatttcgtgtcactcctttctgtgattggcggatggggtggcgttttaccacctcattttgggcagaaaaaaagcaggcaacctttttcagatttcctgcttggtgtgccgctttgtgggcggcggatatttagttgtaaaagttcgggagcaagttgacccgatgtgtgagtggcaaacttgaagttgtcagtccttcttgttcttttcaatagcactaatggtgcaagcaaaacctgtaatcattgaaagtagtattgctccacccattgcttcgttcattccagcaccaaagaaaaaaccgaccaccgccgcaattaccataagaatgattgaaatcattactctcataatatatacctccataacttagaattttctactcttatcaataaccccaagtcatcagattccattctccgccttcactccgtgcaagccaccatgaccaagtgtattcttcgttagcctcccatgcaccgccaccttttttcggcgaacgaaaactgctttcaaatgcaatacattgcgtaaaggcttctttattatcatccgttcttaaatcgttcatccattcaatgttatctgcattgttgcattcttcatccggcatataagaaaggctatgcaattcacagccctcaaacgaagcgaactgcttttttataatctcaatggcagaatctatttcttcttttgaataaacggaagatgctccataatcaatttccacttttgatgtatcaccgttctttccgcatccggcaaagagaagaaccagcacaatgcaaagcgttacggttataatctttttcatagtgaatacctccaactcccgatttctcattgacttcattatactttattcgaccctcaaagtacagagagattttgtaaaacttgtcggctgggagcagcttgcaacgcaaggtgtccccagatggcaagtccacaaaagggtagctggcggtagccagcgcaggggaagcgtagcgtcccctgtttgatttggagcagaccatgactgcggaaaatctcagccctccggcgaggagccttcggagaacgcaatgcaccaacctctgggtggtgtataattgcgcccttagtaaactaagggatttccggcttctcccgttccagcagttttttcaatagttcctgcgtgtcctgcctgtgaaaaatgagtttcaacaacagcatgacatcatcatctgtcaggcgttccggctcttgcagaaaactttccagcataccgccacgggtacagagccggtgcgtccgttcctttcgggtaagctgctttaactggtgctgcaatgccttttcatcattgatggctttccgcagtttcttttcgcttttctccagcttctggtttagcttttccagctttgaggtatcaggcaagggcagcgtcctcctttcccggcatcagcacataaatcctgtttggttctccaactccctgacgcacccgcatgataagtccggcgatttccagttcattcaaagaacgcttgaccgtcatggggctgcgggacaagactgcggcaatggctgtaacagggaagcagacaaacaggattccgttctcgtcctcctgccctttggatagcatagcgtccagcatccggcaatacatgacctttgcggtgctgctgactggaaatcctgtcaacgctctggggaatggcatacagggcggcaatggtgtgtctatcgtcataaattcaaaattcattcggtgtgttcctcctttttgtttgctcgtttggataaataatgggggcagtcaatcacaaccgcccggaagctctgcttgcacccatgctggcatttccggcataattcgttgtaagtgacacgcccccggtcattgaggtaaaaggaaagctcatgcttcctctttttgctcattctcggcatattgcgcttcctcccgttttcgtgtatggtttcggggcgattttcggcaaaattacagccatagagccgcttaaaatctcccgaagtattagcgatagggtagactatccccctatcagattgtcgtgtttcggtatcatttcggtgtcagttcgccagttctccccggtgtcgttcctcccctgaatctcacagcggcgtatcgctcccgttggtacgctcgttttggtcagggttcctccatatccctgccaaaaagtcatggcgctacatcgccggggaagcatatcccacacaggctggtcattcgattggaataatccatcgatgaactacctgtatcatagaacatttttgtgccctgtgccgtatgtccacaaagtaggaatcaggggtaaaaatcagaaatttccacgattgcggaattgatatggtataatcaattcaacggttataaatgtcgttagaaagggggaactgcttcaatgaacggagctactacaatacaggaacggctaaaagatttacgattaaacaaaggattaaaactggaagaactggctgagcaaacgggtatttcaaaatcggctcttggcagttatgaaaaagacgactataaggaaatcaatcatggcaaccttatcctgctggcagatttttatggggtgtccctcgattatctcttttgccggacagagaaccgggcggagatcaacacgccattaagggagctgcatttgagtgatgagatggtagcacttctgaaaagcggtcggattaacaaccgtctgctctgcgaacttgccacccataaggattttatcaagtttcttgcagatattgagatttatgtggatgggattgccaccatgcagattcagaacctcaacgcccttgtcgataccgtccggcatgaaatcattgaacggtatcgccccggcgaagatgacccccatttgaaagtactgcaagccgcccatatcagcgatgatgaatatttcagccacatggttctggatgacctcaacctcattatccgggatattcgggaagcccataaaaaggacagcgagagtgcaccccagaccaccgttgctgatgaactgaaagaaaatctggaagcggtcgaaaatttcaagggcagccgggatgaaaagctcgttgtactttactgcaagcagctcggtatcaactataaaaatctgtcagacgaagaatttcgctggctgattcggattctcaaaaagtcaaagaaaatgggaacgcctatcagccagaggaaaaaacggtaaagaaaaaccgctgttgcatggtttgttggcttccatgtagcagcggtttgtgttatggttattcagttaagttttcagagtggtaagttgtatattataatttcatattaccatggaaaaacaaagtaaaataccaaagcactaattaccgaagcgattagaaaaagcttcttactttttgcttttttatagaacatgaaaagaaaaattagcactcctattacatccatcaataactgaaataggaatgtatgatgccctaaaaagtaaataaaaattacaattgcttctgcggctaaagcacctactggcagagaatataatatagaattaaaaatatgttctttattccagtaatataagataaacgctgctattgcacaagggattgaacaaatagtaaataatataaatagtgaagtacgaaaaccaccagaaaataaaggtatgaatgttcctaatattgcttgtaatccatagaaactcaatgtcattccaaacatatataaaaacgaactaatccctgcacaaatgtttgaagtacttgctaaaacaatgatggtattggtaataatccaaaatcccaatagtgtttgaattgacgaaaaactccataatgtatcagctgggcaataatctgtaagcctgcaaatacatccgactaaaataccaaccaaaaaaattgttatataggatttcatactatgggttaaggttttgttcataaatttcctctccttcagctttcagtttgtaattgtcattctgacataccgtttatgaataaaccatctcatgcaaaataatttcttctgcccggttgtgaatgttattgcaacgctgcacccattccatttgagaagtacgcttcaattcctcagtcacgccctcggcagctttcatctgctccatgatggtgtctaaccgttcctgtgcctgttcgttcaggtctgcaaggtatgtccataacttcccggtcagtgtcaatgtgttcaatctggctgggtggacttcccttaaatattccctgtgcatccgtccgtactttccaatagggcggtgttccttcggcagtttcaagtccgggatgtagtaatctccgacaaggatataatcaattccgttttccgttattcttggtttcaattcgctcatgttccttacctcctgtggaagcaggctcgtctggtactaactcaatcacatcggtaatctcacaattcagcgtttcgcagatacgggctaatgtgtccatgctgatgtgctttccctctttgctcatgttggcaatcatattcgttgtcataccggcggcaagccttaaatcttcttttctcatatcacgctctaacagtgtgtgccagagtggtttatagctgatgtgcatattgttttcctgcctttctatccataccaccggggcggctgccccggcaggaacttttctcttattatagcaccaatcttgtgtaatcacaatttattcttgtagattgtcgctgataccgtctggattgtgcttttcctttctttttgttccctttaattagccatgaactgcttcatgccctgggactttgctcagatgtgataaagaagcaatagaagtgtaaaaaattttgccgttcctatccggcacttgcgcattgcgccggataggtcgggcggtcattcgggcaggtctaccttgccaacgaaagagtagtaaatatcaatgtcctgtctgcgtgtgccgttctcgtcatagctgcactcatgcacaacgattttctccacaaactcacgcaaaagggtaggggtaagttcttcaaaactggtatacttgcggacaacattcataaacttttctgcgtttaccgtggcttcctgcgctttggaaagctctgcccggatagcggcggctctctctttcagttctttctgctcggcttcatagtctgccgacagttctgtgaaacgctcgtctgaaatgcgcccggtcacgctgtcctcatacagccgcttgaagatagcggataactcgctgatacgcttctcggcggcttccagctcctttttccttgcggcgttcctgcgcttgcccccgtcctcgttctgctcgatcagcagcttcataaaacgggcttcatgcttcgctgcatagctggtaactttccgcagattgtcggtcactccggcggtcaacaggtcggtgcggataaaatgcgccgtacagtcaacggtacgcttcttgtagctcccgcagatgtaacaatcctgcttgcgggtggcgttctggtaacgctgctggtaaaggacgctgccgcagtcggcacaaaagagtatgccggagaataagcccacttcatcatagcggttcgggcgtttgcgctgcttgcgtaactcctgcacacgctcccacatctgggtgtcaatgataggctcgtggtggttctcgaaaatcgcctgtttctcaatggggttctctacgctgtgcttggtcttgtaggacggcttctccgtcttgaagtttaccagacagcccgtgtactccctgttttcaaggatatgtaccacggtattggtcgcccacttgcactcatagccggggtggtagcggcgggtgcttcccgtccggcggtattccagcgttcccggcgtggggatttcctgctctgtgagcatacgggctatcttggtcggcccgttcccggcaaggcacaagctgtaaatctgccgcacgacaggggcggcttccccgtcaatgataaaattttcgtcctcgtccataaggtagccgtatacgggtttgctcgtgacgggcttcccgctcatacccttagaccgttttactgctttgattttcttgctcgtatctctcaccagccattcgttaaaaatgttccgcagaggggcaaaatcattgtcgccctgtgcgctgtccactccgtcattgatagcgataaagcggacgcctttctgtgggaaaatcatttccgtatacattcccacttgcagatagtttcgccctaaccgtgacatatccttgacgataacggtgccgacttttccggcttcaatgtccgcaagcatggcttgaaaaccgggtctttggaagttcgccccagaataaccgtcatctgtgtaccattgcagattggaaaagccgttctgcttcgcataggtttcaagaatacgcttctggtttgaaatagaattgctctcaccttgcagctcgtcctcgtgggataatctcggataaagggcggtaataaggtttcgggtggtctgtcttaacatagtgtcctccatttccgacagccagccccactattccgtatgactatcataccacacgccggggctggctgtacagtcctttttgcttctttacgtcccgtcaaattgccgatttttgtgtagcagcttccgcttccagcactttcagcattttatcggcggcggtggcggtggtgtcctgcttgaaatagccggaaacgacaaggacagagttgcccatgcggatttccgtcacgcaatccgggcggcgggtgctgcggtcattctttggggtgttggtcataggcggctctcctttctattcatcagctttttcaattgttccattttctcctgcgccgtggcttttcggaagttgctcccggtaaagcggacaggggaacacatttcaatcagacggtcataaatgcgggcgtgggcggtgtcctccgggtgctgcaagtcctccagcgtgagattggtcgtgacgatcagcggcctgccgctgcggtaacggctgtcaatcacgttgtagacctgctctaagccgtattccgttccccgttccattccaaaatcatcaaggataagcagcgggaagctgcatagccgggagatgtattcgttcctgccctcaaagctggcggcaaggtcattgagtatcaatgcaaagtttgtcatgcacacggggatttcacgctccataagggcatttgcgatacagcccgcaaaatagctcttgcctgtgccaacgccgccccatagcagatagccaatgttgcgctctttcatagcttcccagttctccacatagaaatgtgcatgttccatttgcggacatttgccgttgtcgttctcaaacgtccagccctgcatagccgggtctgtgaagccccgccgcttcaaccgctcgacagtttcaaggtggctgcgctgtttctctgcggcttcccgtttctcacgctctgcccgctggcagtcacattctgccgggtggcggtcacgcccgaaaaggctcttgccctccgggaaataggcttctttgggcttgcggcatttgccgcagtataaaagcccgtcctcgcctgtgtagtcctccggctccggcgtggtatcggtcatattcaaaatcatttcgtcaaatccattcgtcataagctctcgccctccttgcaggtataatcgggtatgccctttttcggggctttcttggctgcgtcctcctgcgcccacttgaaaatcgtggctgcatggctcttgtatttcctcccgctggaagcgatatggcaggataagcggtcaatgtaatactcccacttgccgggaagctctgttttcagcccgtcaagctccgtatcggaaagaataacattgtggtatctgccataggcggcgggggcggggtgtcctgtttctaactctctctctttttctatctctatatctatctctttctctatctctatctctggtggacaaatgtccgctcgatatggtggacatttgtccgcccctgtctgcggcagggctttttgttcctgcaaagccagcctcgccctgcgcttgcgctccccctcggtagaggactggccgattaaaagctcaatgttgctcatgtagagtgcgccgctttgcaaaggctccacaagccccagcttcataaagattttcaaggctctctctacggtgcctacctgctggcgggtaatggtcgcaatcatctgggcggtgtaggggatattctcgtcaagctgcaatttcccgccgtttttcagcgatttcaagtacagcttcaagaggatgttggaatagataacgccgtcctgcatactttccagcagaacgattgcgtcatcatcaaaatagctctctttcagcttgaggtagtaatatttgcggttatctgccataggctgtgtcctcctttttccagcgtttggaataatagtgggggcatagtatgataaccgcccggaagctctgtttgcagtcacgggtgcagccccggcataggtcgttgtaagtgatacggttgcggtggttgaggaagaaagaccattccagccgccgctttttgctcattctcggcaatggtaagctcctttctgccgttcctatcggtgcaacaggatagggggcattttctgtatgttctcggtgtcattttcgggctttttctgccctgtaagccccgtttggaagtcggggagtattgcggtaagggttcatatcatacctgtatttttgtagggtttcggtatcatttcggggcagtctttaacgctcctgttcgtgctttttctgctggctcggtgcgccccttaaaatctggtcgatattgcgtctgactgtctgaagctcctgcgcccgctgccgtttctcccggtagtcgttatatccggcgttcttctgaacggtaagctgctcgatctccctttgcagggctttgctggcgggcagcttggttattccatgctcccggaaatagcgggcggctgcgtccgctatgagaaaatcgctttcgtgctgctcccggtaggctctccgggctttctccgatttctgcgctttcagaccgtcacgggcgggcttcgtgccgatatagcccaaaaggttgcgctgcaattcctttttctcccggatagcggcttccagccctttcagcccggcaaggctctcctgcgtggcggcgttggctgcggaaatggcagcgtccagctcgtccggggaagaaaagccgtactgctggtagagcatgagggtagccgacatctgtttgaggttgtgcatagtcgcccacttctcatagccccgtcctttcccctcggctcgcttggcggctatgtctaccatgcgctgtacagcgtcattgttcggggcgtttttcgcttcttttttcgtccgtaagcggtctttgatactgccggggtattccgctatggctgcgggtttttcggcggctctggcggcgttctgctccaaaacggagaggacagcagcccggtcaaaatcgtcccccagcttccgggcggtaattggcttcgtcctgtccggcgtgaggtaacttagccgcccccggctctccttgacggtcacaccatgccggagaagcagggcggcaaactcatcaaagccggaagcagcggcaagggcttcccggatagtccggcgcagcttcgccttatccgtttcaaacttggtctgccggggcgtgataccgtccgcaatcataggggcgtttgctttatccagcgcaacctgtcctttcttctgcgcccaatattcacgctcggtaatgcgctccttgctgccgttcaaaaggtctatctgataaagcccctcgctgtggcacatttccatgacttcggctttcagatagttcatagctgcgtctgtgcagcggtgcttgcagcctgctttcctgtccgctggcctgtccatgtggggcagcatgggaacctccgcaatccgcagactgttaatgacgatatgcacatggatattttcggtgtggctgtgcccgtccgggtgggtgcagacaagagcctggtgtccggggaaatgctcggcgcagaacttctcgcccagctcctgcgcccgatcaacggtcaagccgttgtccgggccgtcccgtgggtcaaagctgatgatatagtggtggctcttaacgtcctcccgtttctggttcttgccatagcggagattggagcgcatacaggcaacggcaaaatcctccccgtcacaattcagagaggatatgcggtagtctgccctcggtatgagccgcccgtctgcgtcaagggtgggcttcatggtaaactcgtcatgctcgaatgtgaggtatttttcagcgttcccgtagttggcatttttagagctgatatgtttgagtatcgccaacggcttcacctactttctgcaagacttcaaacttcaaggcggcaaggtcggcggcagctccccgtacctcgccggataaggcggtataaggtgcgccgtactcgttaaggctccgggctatctggttgaggtttccaccgattttcccgtactccgctgtgagcttggagagggcggcaagcagcccgtcattgacaggggaaacggtaatcacggggcgtatggtcgctccccgtatggcttgccggataaattcggactggctgatttcatacgccgccagccgctccgtgaagtcggcgtattcttcatcagacaggcgggttttaaccacatggcggcggtggggcgtgttgtatttctttcgcatggtctgtgacctcctttctcgcccgacagggcgcatagcagggtttggggaaggcactccccaacaagattcccgcaggggcaaaatgagcggataagcgaattttggtactgtggtagaatcttgctctgaaaaactccggcgttccccggttcccgtcctttccgctaacaagacgtttcaaaagggctttgctacccgctattccggcatatcttgaaaattttcctttcactacctacaacaccacgaaaagcagaatagacggagatttttagaaatttccccttattccctacaacaccacgcaagccggaataggcggacaatggcagtattttttctttgataccctccacggataggaacaggcttttgccaactgcggcggctattttctcttttgttttttcatactggggattttcaaaaacgccgaacaggaacgaaaaaagcagcaaatccgttgaatagatttactgctttctggttgccggcgaagcggcggttattcagttgtaggcggtagagctatctcccaaagcggaacttgaatatagctgtgagaagcgtctgggtgatgtagtcctctgtatcttggtctatccgtccattcacacgggcggcacactgtatgcggcggcggtaatactgcaacacggttcccaccgcttccggctccccgctggcggcttgtacgattgtttcataagggagaagcctgttattcttcatgcgctattccctccatttccgcttggagctgccgtagggcttttcggatatggtagcccgctgtgctgcggctgcgcccgtactgtctgccaatttcgtgctgtggaatacgcttgaaaaaggacaggtaaatcatttcccgctcccgttcgtccagccgtgacagggcttccgcaagtaagccgctgctgaaaatgaccgtatcgccgcaaagggtaagtatgtattcctcgtccggctccggggcttggaaatattcatctgtcgtgcctaaagggtagtgcttttcgtctgtgaggtattcaagggatatttctcttttgtgcttcctgctccgtgtcctcgctgcgttgatcgttgcatttcggataacgactttgcaaaaggcatggaaagtgtactcgatatgttcccgatattcttctgtacaggtcatggaaaatccccctttcctcccaaaagggctgtggctggttagtagttgctttttatgatagtaaggggcggcagcactttaggctgtcgccccttgattgcctaccagcaaaggcgggcggggctgtcaacggctgcgcatatgcgccgttcatcttgaccgttgactggctcggctgggtttgctatttacccgacaaacttgaatttattttaagctatcacgttttaccttcttaagccttactatcattaccataggaatttctttgttggttttaaaacattcttcataaaatccatcaatgacaaatccagctctaaaacaaaggttaaaaatatcttgtatggaacgatgataataaatctgctctttcggttgcccttcaatcgctatatcatagtaactgtgcggtgtcatatatttttcagtcaacgtgacaaaacaagggtgttgcgttgcaaagacaaaaattccgctttcctgcaacagttcataaacagccataagaagtggttcaatatccgtaatatccataattgccatattagaaactgctttcgtaaaggctcgatttctttttaattctaatatactttttctatcggtcgcatccgccacacaaaattcaatttgttttgcatattgtgattgccgtcttttagccaattctatcatttttttgctgtaatcaaaagcgacaaccgaagcgcctctttgtgcaagatacgaagaataatttccattgccacacgcaatatccaaaatgtaatccgcaggattaggagatagaagttccgttactttgggacgcactacctctctgtgaaattcattagattcgtcacccattgcattatcccaaaattgtgcgttctcctcccagatttttttactttcctctgttcccatgttctctcccactccccaaatttgcttttttgcttccattaaatcttccttactatattccattgttaccctccataacttctgattgttgccgtcttgacgattatgtatctttacattaccttctgaaacatatggcgcaccttgtccaggcggctgtttggacggcggggctggatgaccggctgaccgacagcggcctgatatcctttcagctctgtaaggcatacgctccgcccgttggtgtaaaaggccagatcagtacggtatgcctgtatacagcgggcgggaatctcgccagtaaagacaacttcatccttttttacctgggccgtttcgatggtggcacagtatttcggtgcatcatgataagccctggaaaggtattcctggggcgcatagaggatgaaggagagataaggttccagcagctgcgtccccgattccttcaatgcctgttccaatacaatcggggccaatgagcggaagtccgccggcgtgctgaccggactgtaataaagcccgtattcaaagcaaatcttacagtccgttacgttccagccgaacaagccctgctccagcccgtaacggataccatccctgacagcgttttgaaaactctggttcaagtatcccagcgaaacccggctctcgtattgtacaccggagccaagcgagagtggtgtaacagacagtcctatggatgcccaaaacgggttgggcggcacctcgatatggatggtgtggctggctgctttgagcggccgctccatataaatgacggagggttcctttaccactgtttcaagcttgtatttttccgacagcaaagcggaaacaacctccaactgcacccggcccaaaaaagaaagaatgatctcatgggtgatggaatccacttcgcaacgcaaaagcgggtcagtatccgcaagttgcgtaagagcgtccagcagccgttctctttgcgctgccgttttcggcgcaatcgtcgtccgcagcatggggagggggtcctcgcgccaccttttacgagggagccgggtttggtcccctaatacatcgtttaacctcacgctgtcgctgggaaggataacaatttcaccctgataagcggtgtctgtccgaacaatttcccctttggatggaatacgcatctctgtgattttcagcttttctctcccggccagggccaccgtatcccgcaggcgcagcgttccgctgtataaccgtagatagacacgccgctggccgcaatcggtgtactcaaccttgaaaacgctgccgcatagggcggcgcccccctgttccccaatcggttggaacagccctgtcaccgcatccatcaacggttgaatgccaaggccatttttggcgctgccatgatagactgggaacagggaggcgtcttgaacccgctgctgttcctcccgcgcaagtttttcccggctgattggttctcctgcgatatacttttccaataattcatcgttattttcgatgaccgcatcccatgcttctatgtcggtattttcctccaggactatttccggggacagcgacaccgtctgcttgatgataatatcggcggagagcttatcccgaacagactgaaccacgctctgcaaatcaacgccagcctggtcgatcttgttgataaagataacggtgggaatgttcattttccgcagggcatggaacagaatacgggtctgggcctgcacgccatctttagcggagatcaccaagatggccccatctaaaacagccaaagagcggtacacctccgccaaaaaatccatgtggccgggcgtatccacaatgttaactttacatctgtgccactggaaggaagtgactgccgcttgaatggtaatcccacgctgccgctccaaaaacatggtgtccgtcctcgttgtccctttttcgacgctccccggttctgaaatggctccgctggcatatagcaggctctccgtcaaggtcgtctttccagcgtctacatgggcaagaattccaatattgattattttcatgtgattgtcctccctttacagccccaaagggcataaaaatccccagcagtaaaatacttttaccactggggattataagttgcggacatacacatatacagcatacacctgtttgtgattgctgtttttggggatatgtcaaaattgataaggcaaaagtattcttaaattgggtacaaaaaactaagcccctacaaaaggagctatcataatcctttgttcccactatttgattatagttttatttaagaataccttgccgcatattttttactccttttctggaatgaagctattatatcacatcagttttaggaaagcaagtacctaaaagaaatttttcttccccttatatgtaacaatcataccggcttcctagcgttcagaatgttttctgctgtctgctgtggtgtttggttggaattgtccaaccaaaagccgatccgtggtgttgtctgcattttactaaatacaaattcaatgtatacagaaagatataaggagtgggagggattccgccgtagttggcattgtaggaaaatccaaaagtttagattttcccacaatgcttatcttttggtctttggttcggaatagtgtagtgctggcggtctatctcttgttttcggttgcttgcttccttaccgtacatgagcattggagcccgggttatccgagccgtagccctccagcagattaaccacgccccacacgccaaggccagcaccgagagcaataacgagggtctgtaaagtgtcgattgcagatgagaaaaatgccatataagcctccatttctccgggattttcccggtaacaaaaaagccgcccttgcaggcggcaggttacaaacttcgggacactttgtctcgaagcgtttatgcaaaggcgtctggatcgtcgatgtcatcatagttgaggatgtcctcgtcctcttctgtgagtgcatcgtccggcacagtcacctcatacatcgtacacgcctcgttcagaccgggccgcctgcggcggttaatgagcctgtcaaggtcaaaagcgtttttctgtttatcggcctccgccgtaaagcgataattggggtgctgtttcaaatcatactttttggaatagaacggcggcagcccccggagctgcaaaatgcaccgatctccgggcatggtggcgagttcacttggggtcatcagctcccgccccagccgttgggtgttctgactgtaactttcagactggccccgtgagcgcccctcggtctgcatggagatggtggccttgcccagccagttctcggaaatttccttgatggtgctggcctcacggccaccgaggaacagcacgctgtccatgttgccaaggatggtttcagtgttcttatcgtaaatggccttgcattgagcaagctgctgatacagcaggcacaggctgatctcccgtgagcggatgaccgccaccagcttttccaaagtcggcacctgtccggtgttggccgcctcgtcccacagcaccctcacatgatagggcagccgcccgccgtgaacattgtccgcccgttcgcacaggagattgaacatctgcgaaaaggccagcgccacaaggaaattgtaggtactgtcggtatcgctgatacagaaaaaagtagctgtgcgtcgatctcccatgcggtcaagctccagttcgtcataggacatgatctcccggagctggggaatatcaaagggagcaagccgcgcaccgcaggaaattaaaatgctttttgccgtcttgccagagacaaattgtcaaggactttttaatcaaattcacaaaaaatctacaaaaaaggtgccagaagcaccgtatggctcctgacaccttgtttgatagattacatttttccgttcagcaggtctttgcagagatacgcatagtctggcagctggttgatatatggctcccagcaccgcttgatttcggccaattccagcggatcggctgcttccagtgcatgatcgttgcctgtcatatataaaacatccgtagcaacatcatccaaacacctgccgcagagatcggcggctgattcgattctgataccggtatccacatagactggattgacgccaatcgccagccagacatagcctaccttgtccgaccagagcagttcaaaatcagggctttgccgcagatgttccgtaaagacctcctttactcgttcaatttcatgcttctctttttctgtgtaaagcattttcgtgtcctccttgacaaaaattttggtgcgtaccatcatcagtttagcacaaggcggcttcgtttatcagtctgtcacatctgctgaatttcatttttgagcatacgcttgattttatcgctcatggtttctgtgctggtattgctgaaatggacatgaaccttgtaggttgtcttgccgattttctttaccatcgctggcgtgttttccggcgctctggacgcagcagcggcgtctgccacctgcatagtacggggttctctgttcatggcgctcctttctccgaacgggtctgtgccgcccggtaaaaaatcagtcgtgcttactgtttacaatgtcttttgctgcctgtcgggtagcaccggcattttcttcccggaaattcttcccgtcaaagagaatcggcgcacaccgttccagaatacggtcatagatacgggcgtgagccagatcgggcgggttttttaactcggacagtttcaagtttgttgtgataatcatgggtctgcggctgcgatagcggctgtcgatgacgaaaaacatctgctccatagcatattcggtactgcgctctacacccagatcgtcaatgataagcaggtcatactcgtcaaagctggcaataaactccgacctgtcctcagagaacatcccggtcaggcggttcaggatggtaggaaagttcgtcatcagcaccggcacatcccgatcaagcagggcgttggcgatacatccggcgaaaaaggacttgccggttcccacatccccaaacaacagcaggccggtgttgttcctgtatgcctccttccagttctccacataggcgcgggccttgtccatcaatgggttttcgccgttgtcgttggcaaaggtgtagtcatagagatagcggtcttgcaagccctgtgcctttcggcgtttgatacgctccatgcggcgctgccgttcttcagcagccttgcgctgctcctcagcctcccgctggcactggcagatgcagcgcggcataaagtagccggatttcccaaagcatggcacaacggtctgcctctggccgccgcatttcttacagtgaatgaggccgtctgccgggtctatgtactcgtccccggccagttccacaccggcggctgccttgtcgatcagcgcccggatttctgcggtaatctcaatcatacggtttcatcctcctttacgctgtaatcccggttgcgggtgggcgaggctgctttcttcgcgtcctcaccggcccagcgccggatggtcgctgcatggctctgataacgcttgccggtagaagccatgtactcggacagtttttcgatgtactgttcccatacagcaggaaagctggcctgcaagtctgccagttcttcatccgtcaggaaaacattctggtaacggccatatgtgggcggggtgtcccttctctatctctctctttatctctatctctttctctaactctatctctatctctggtggacgaatgtcggacaaatgtccgccgtttgtccggggcgcagaaagagccttattttgaagccttgcagcccgctttcgctcggcctcggtagaggactggcctattaaaagttcgatgttgctcatgtagaatgtgctgctctccagcacttccacaagacccagcttcaaaaagatctgcaaggctctctccacagtgccgatctgctggcgggtaatggtggcgatcatctgcgccgtgtaaggaatgtcctcgtcaagttgaagccgtccaccatgtttcagcgatttcagatacagcttgagcagaatgttggaatacagcacaccatcctgcatactttccagcagcacgatggaatcatcgtcaaaatagttttctttgagtttcaggtaataatattttcggttgtctgacatagggttcctccttggggtttctcttgggattctgtacgcattttaaggccgttttaggggtcggaggataaatctatcagcctgcctttgacaccctcgaaaaaagccttgatttacaatggtttttcagcccctaaagcgtgacatttctcccgttgtttccgcttgcgctttgcggcgttgatccgcttcatgcgtgcggcacattccgggcagtatttggccctgttagaaccgggggtaaacagcgccctacatacggcgcaacgcttggcgtccaggcggtggaacagggccgtttccagttccctatccagcggtagcaccgccgcccggaaccaccggcataacagggaataggaaatggactggacacagacacattcctccccatcgtccagggcgatacagtttccgtcgatgtagttacagcactcatgcaccagcctccgcactctgcggtactggcggtaatccatgacggagataggttcagacttattgttcttcataaatgatttctttcataaagtcggtaacctccttaaatgaatttattgttaaatgttcgtgcaaagtattgttttcttcgtgcaaatagcatatactataattaccagcagaaaggggttgatcgtatggctggaaataccacaaacatcagtatccgcatggacgcagatttgaaagcgcaggcggacgcactgtttactgaacttggcatgaacctgactacggcgtttaacatctttgtgcgccagtcgcttcgtgaaggcggcattccctttgaagtaaggctggaacagccgaacaaagaaacggttgctgccatgctggaagcggaaaggattgcaaaagacccgtctgtaaagggctacaatgaccttgacgagttatttgctgacctgaaaagatgaaagaaaccaaatataccgtcaagtacacgaccagtttcaaaaaagactacaaacgagccatcaagcgtggcttgaagatcgaactgctggagcaggtcgtagcattgctggcaatgggcgaaccgctgccggataagaaccgtgaccatgacctgtctggcgattgggcaggccatcgagaatgtcacattctcccggactggctgcttgtctaccgcatagaagatgatgttctggtgctgacgctggcccgcaccggcacacacagcgacttgttcggcaaataaacagtctgccgccgtatggggaaacctgtacggcggtttttctgtgtgcaaaagtatgtcgtgaaacgtggtagcccttaccgctccggctcccggtcgtgagacttgtcccgttcctgtctggacagctgctcggcggttttgcggagccgttccactgctttcaaatcctcccgcatggatttcatggcaagcgtgtccgtctgctttccagcggccagctggtcaatttccagctgccatgcctttggggtgattgcctcgccgctgtctttcagttctttcagataccgggccgctgcgtcatacaggatcagttcccggctgtggcgctgttcaaactgttcccgtttttccggctttactttggcaagctgcttgtggatggacttgtactggttgtactgttcccacatctccccgcgctcggtaagggtagtgatccggcgctcggccttgacgatctttccgcgcaggtcatagtaacagctgttcatatcagcgattttttcatgaagctgctgcatagactggatgccgtttgcctgcaaaaagctgaatagtgcagcgctttcctgcaaagcccggattttgccggtgcgggtgtggggagcgttcaactgctgctgagcctcccacaaagctgtcaagctgctttgctgtgtttgtggtttttccgtttcggctttcgaccagcgataaagacgggtaatgcgggctttaatttctttcagcagtttgttgtcggcggcaatctgtcggtttacttcccccttgtcggtgcggataccgcgattttccatttggctggcagctggccccagatggacagaggggattttatcaattccctgccgcttgtaactgcggtggtcaatgcgctccggtctgccggcagattccagcgcccggttggtgcaggccgcccacgctgccctccaaatctccacattccctttatcgttccagttggtcgtatcctcccgatgatttttccagccgcctttcccatccgggatacgctgcccgttctcgtccagatcgtatgccttgcggcactttgcaccccactgtccattttctttcagaggccggagcgtcagcatgatatggacatgagggttgccggttcccttgtcatggatagcaaagtcaacacacattcctttgtctacaaagttgtccttcacataggcgcgcacaagggcaagctgctgttcaccggacagttcacggggcagagctgcctcgatctcacgggcaagctggctgtcccttgctttctcgatttgctccacgctgttccagaggatagaacggtctgcaaattccggcggcgcgtgggcaggcagcatgatctccgcatggacaatgccgcctttccgggtgtagtcgtgggtcattccatcccattcatttgtcagcttggttccgctgcggtaagcagctgcggcaacggcagaacggcccgcgctgcgcttgatgatactaacgggaatatgacaaaaatctatgggtggcacctcctttcggtaaggggtattcaggctccgtggagccggacagacgcgaagcgggtgtctggctgcgcagagcgcacaaggggtttggggagtgtagcgccccatcgcgctcggagagcgcaacagcccccggcagggcgcacgacaccggcaacggtgtataagtgcgcccttgtaaacaagggacttacggcttgcccccggatttcggcagttttgcggccagttctgccgcccccggaagatgggacagggcaatcaggaacgctttgacctctacgccgggaaggtcgggggccagagggaaaatgccctccaaaacggccccacgctcaatcaggcggcgggtgcgaaccctgcgttcttcgttccgctgcttgttctccaaaatcttctttcggttttcaagctgccgaatctccttcaggactttctcccgttcttctttttgggggtgggctgtaattttttcgttcatgtcaggcacctcttttctttgaaaatactcatagattgaccgtccatttctgtcgagcaaagtaccggcgcagcctccgcagtgcggcatggatggattttcccgcctgtgatggcgtgataccctccattgcggcaatatctttcactttcatacccagcatatagcgggcgtggacacggcgagcctgcataggcggcagggaggaaatggcttcatacaatcgccgtatcagttcttcgtattcggctaattcttctttttctatcaggtagtcctccggcgatggctgcgcccagccgatggcggcattttcgattccatcgttacaatcaagggaataaaacgccttataccggaacatcttgcgatctctggtggcctcggctctcttgtccagaagaaacgtttcgacgatctcatcggacacctccacaaaaatgtcctctttgcaaaatggataatattgtttgagattgatggtctgcataggcatgccctcactctgtttggaaaaggccatcatagcagcggcgcatattccgcagaccccggcggatggaaacgctgaccttgctgctgtggacgccctctatccgagagatttccggctgcttgataccagcaatgtagtaggcgtgaacacggcgggcctgtgtcggagtggcatgagccagagccaccggcagagctgcaatcaggtataggcgggtggtcatttcttctcgttccagcaaaatatcttccggcgatctgctgtgttccagtgcgtaattttccagccagctgtatgcgtccagagagtagtaggcgcggtggtagactttccgacgctcatagttctccatctcccgcttggcctgatacatcgctgcccatacctcgtccgtaacatccacaaactcgtcatgccggtagtggggatacatccaccgcagattgattgttttcataggcttacctcctgaaaatcggagaggcgggcagctcatccgctgtccgcccctcgctgagataagggaaatgatccctttcacttggtagccagaaaacaggtcattcgttaagcctgttctcaaagaaatttataaatttttttctgaccgcctccacactttgatacacagccactttggagcaactgcacagcacaccgatctctgcaaggctcagtccgtcaagcgcatagagcaagaaccggcggcgctgggcctcggtacaggtgtccagaacagccatcagctcatgcagtgtttccttgcggcaaaggtattcttccggcgtttcgccgtaggctcctacaccctcagtggtaatgatgtactcgtcaaactcccggccatcccaatgccgccgctgttcatggaacaggttctccgttttgtgatcggcccggtcaagaaattcatagacttccagcgtgacctccacggccacagcttgtccgttataattgatggtaacttccatctgcctttcctccattcagattttttcgggaaaatctgaatggggcggcggagaacggcaccggggataaagttcgggccatgctgacccgatgttccggctccatagagacaaaaaagcgcccggacggcataaagccatacgagcgtaatagagtatattttgctgtttagttacatggtatagtgcatacttctgaccgcattgctccgctgctgggaacagactttttttagctggtgcaggtcatggggactgtgaaaaaaggcaaaaatagacacggcggcaatcctcctatgtgccgccgtggatttacacggtgttaggtcgtcgttggtttagcgtagacgaaaagaaacggcggctctgaaaatcaaagccgccgcttcaaatgggcgtgtcgatatggctgctgtacgacgactttttttcttttttcgtcgtgtggcagtttctaaatcaacatgataggctgttagtcggtagtgctgcctacccaattaggattgaaagttgtcatgcactcatcgtccccattcacagacttagatacgagaagcccatttttgatgtcctccagggtctgctcatattcggcaatgtactggtctgtcatttcctgcgtccactcgaaagagccctcgctggtttcggccattgcgtgctcgtcggccatttcctgaagagttttcttttcctgttccagccattccttgtactcgtcataagtccaccactcgtagttgattgcgggatggctgttattataatcttcttcggacatccagcttgcgccattgtcctcgctgacaaaggtctttccgctctccttgtccttgtagctcataacgccatcggaatcatccgttgtggacacgaccgttttctgctgtgcagaattggcaacaggtgcgtttagcgcatgagcttctgtgaccccatgcaagggacttactgcacccagtcccatcaataccgtcagagccaatgctccgaatttagcttttaccattttgctttgcctcgctttcaaaaattatagctgtcctcttgaggacagctataagataacaaaatgatttggatatagtttgcaaggaatatggagtttagatggagttgatagcacctctttcttgcggcatttcaagccagaacaccacacctctgcttgtgttttggataccatattttgcgtggtgcagttccatgatttcgcggacgatataaagtcctaagcctgttcccccggtattacgattacgggaggtatccgctctgtaaaatgcttcaaatagatggggtatcatttcctctggaatatggacgcctgtattttcaactttgcaggaaacggtatttttatcgttcgataaggatatatagattgcctcaccattcggtgagtagcgaatggcatttaccaaaacattttgaatggctcgttccatctgtgccgggtctgcatcacacaggattttgtcaggaatatccacggaaagggagatttctttttcagacagcaaatcggtcacatcagctatttgtacccgaagaagctctgcaaaatcaatcgtcttatattctgttctctgttttccgtctgttttagatacatagagcagttctttcactaatgtttccattttttcaacaacggccagcgaccgctccatatacgactcttgattttcatatcctttgaccttattgagcatccccattaaatgacctttcagaattgtcaaaggcgttttcagttcatgtgatgccgccgagaaaaattcctgttgctttttttcaagttctcgctcttttgatatttcggcctctaactcggaattgctttttttcagttctgccaatgtatgctgtaaattatccgacaaagtatttaagctgtccgagagtattcctatctcgtctgaacgattagaatttccgtgcggctcaaaattgagctgggccattttttgcgatgtgctgcttaattcaataatcggttttgttatatagcgtgagtaaatgacagaaaacaagatggacataaagaagattcccaatataaccagcggaacggtttgccaaatcgcctctgttgcctgattgacggacaccgtatcactttgcacataaagggtatagtcgctacctaacagggtgaacacatagcctgcttctgtcagtaattcgtcacttgtaataattgcgctatcaggattttcttgaatcgtagcaatagaatccttgtctgttgttatcgtcaatttgtcacttgaatataaaatatctccataatcatcttcaatataggcagttgcttttgtctgtgcggtgaattgctgaacaagtgaataacattcctctaaggaaccagccttttccaatactggcactaaatcatttgcttgcttttgcaattctgcactaagtcgattgctataagtttggggaatatatctcgccatactgaaaacagaaagcaaacataccaaaatcaaaagaaccgttgtcgctaaaaagagctttgccgttaggctcgttttaattttccttatcaattctgtatcccacccctctaattgtttttatatagtcagcatttaactttttgcgaatgttctttatgtgactatcaacgatccgatcttcgacctccaaatcgtccgcccacaatcggtcaagtagcatttgccgagtaaagacctttccctgattttcaagcataagcctaagaagcgcaaactctttgctggtcaaaacaacctcgtttccgccttgatatacatggaatccatcaacatccatactcaactctttataagtaagcagggattgattttgattttccacagtcctacggcgaagaatagccgcaatcttgcacagcaggattttgggcgaaaagggctttggaatgtaatcgtcaatctgctgttcaaaaccccgcaactggttttcttcatccgaaagcgcagtaagcataataatagggacttgtgaccttttgcgaatgacctcacacacaccatagccgtcgattttagggagcatgatgtctaacagcaagaggtcgattgtatcatcaaacattgcaatccccgccacgccgtcagaagcaacagcaacttcatatcccgcatcaatcagatggtttttcaatatatcctgaatgtcaatatcatcttcgacaattaaaatcttctgcattgtcccacctccaacttttcaagtatagcagagaaatatgtatctattatggagaactcaagatttagaaagattattataattataagttacctctgtgttgcaaagcaagcgcgaatatgaattataaacttcaatcaacctgcatatagcaacattccacgggcgaagtatgaattatacaatgtaactgggtgatgttatatggcgaaagttgaagattgtcccggttttgaaaccttcggcgcagatgtcaaagctgcacgagaggcaaagcgtctggcacgaaaaacattggcagaaatggttgggattgaatggcggtatcttgccaacattgagaatcaaggtgcgattccgagcctgcccgtgatgatccagttgattaaggtctgcggacttcccgtagagcggtattttaacccggagatcatacgggaagaaagcgaacagcggcaacgggtcagccacaagctgaagctttgccctgaagaatacctgccgattatcgaaggtgccatagacggggcgctcaaaatggaacagactgcgaagcagaaggaggacgcataatcgcggcctccttctggcgtttctgtatcatgtttccctgcacttttccaaaagttcccggcacctctgctggatttctccggtttctgtcgcagtcaggtcacggtcatttccagtaatcttatcttccagaaagttggcgtatgtacccaacaaagcgttccgtaaatcctccggggttttctgtatttctgcgctgtaccagtcattccggtggggttcccatgccatcaatgtataaccatgactggtctgaaccacctcatacagagggtcatcatccagatatgcctgaaacactttcaaaaccttttcaaaggtcagcatttcccgcacctcccattcatctgcaaatcagttccctgattaaaatttcctcaatctgtgccgttaatgtgttcatcagccccacccagcgcatagggtcacaggctttcagttcctccgtgacacccgcaacttccatcatgtgaggcaacatggtttccacacgcccctgtgctgtccgctcaatctctaacaggtgtggatacagcttctcgctcatcagcagatggttgtagagaatggggcgatgttcctttaggtaggattttcgcattctgccgtacttgccgatagaagtttccggctgttcagaaaggtttaggttgggtatatcataatctccacaacgaatgtaagtcaacttactcatattcattctcctttgctccgtgatgattagactgctgcgctggctgctatgctgcctttgcgcggttcttcttttggtagctgaccgatagtagaaaaaacaccttttttcatatcctcagcccggatcagggctttcttagcgtccatttccgcttttttcttcgccttgattttgtcctcatactgtttctgtgcgccgctggctttccgcctcaaataattctgatgaagcctgtccttacgttcttcttttttctgcagttcttcctgctcctccgtggttaaaggaaccggccgtaaagatggtgggatatagcgccctaaaaaattaaagtagatttcaatttcctgcgtggtgtcctggctaccttttcgggcgcgttcgtggacaaggattttctctacaaactcgttgagcatggtgtttgtcagaatgtcaaaattctcatacttatcaattagggctataaatttctctgcggatttctggctctgctcatagccggtaacagccttttccagctccgcaatttcaatctcaagtgcatcctgctctttggcatactgtgcatcaagcgccttatatcgtgcatccggcagcttgccgagggcgttgtcctcatagattttgcaaatcagtttttccagttctccggctctcttttgggcagcagccagacgcctgcgctttttcgatatatcggcactctgttgagcaacctgcgtctcctgaacagtgtgaataaattccgtccggtcatttctcgaatattcagcgatagcccggagcgtgtcggaaaccaatgtcaggacagcactctcattgatacggtgttgtgtagggcatagtgtcccacacggaactttggtataattggaacaggtatattgagaaatcctcttgccattgttggtgcggtggacatacatcttgccgccgcaatcggcacaatagagcaatcctgtgaggggagccgcttcgccccagccgtttggataacgccgtacattgctgcggattttctgcgccaaatcaaaggtctgctggtcgataatggcttcatgggtattctcaaagatcgtccattcgtcctcagaaacatagtggcttttcttgtccttaaagtgcttgcgggtcttgaaattgatggtatgccctaaatactctcgttttttcaaaatgttcacgatggtagatgatccccatccataggggtctttgaccggctttgaacggttcacaccctcgttgaagcgggcaaggtgtacgacaggaatttcaatccggtctgtggataatttgcaggcgatctggtaaggcccatatccctccagcgtgagggagaatatacggcgtaccacttcggcagcttcctcatctaccagccaatgctcccgcttttcgtcccataagtagccgtaaatcacagtgccggtcaggtgcttgccgctcatgccttttgacttaaacacagagcgaattttccggctggtatcacgggcgtaaaattcattcatgatgttgcggaacggggtaaaatcgtcatcacctttcagactgtctacaccgtcgttaatggcgatcagccgaacgcctcgctgccgcaaaacctccataacttgaccgactttcagatagtctcgccccaaccggctcatgtccttgatgacgattgcctctacacgccctgcctccacttcctccatcatcgccaaaaatccggggcggtcaaaacgagtgcctgagataccatcatcggtaaagtgcgtagggttgggcagcccgttccggcgggcaaaatcctctaacatctgtttttggttggatatggagttgctctcgccctgtaactcatcgtcccggctcaggcgctcgtacagtggggtaattttttcatttctcatggctgtacctcctgaaacaaaaatgctctaagtgattgcttcactaaccatgacaaaatcatgattaagaagtcacttaaagcatatatcaccgcttgccaatttgtactttttatactgtttgaccgcgaagcaatccggcttgcgcttttcgagcccggcaaacatataatccaccgcgttcataaagtcctcgtcatcctccttgacctccatgccggaaatcatatccacaagggtattcatgttccgatcctcggcaggcccctcgaaaatgatgtaggcaatcagggcgcagtataaaagcgtttccgatttcgtccagaatggatcgccttccttgccttcgccctttgtgttggaaatcagggcatccacgaatttcagaatatcggcctcgttgcggatatacgccagcgggttatagtgcatggattttgaaaaatctatgctgttgaataccttgattttgtacccgcgtttttgcaggaaagctccgacctgtcccagcacaccgcctttgggatcgaccaccacataagaggaatgggcctgtaaaagctggggcgtaagccagaagcgggttttgccggagccggatgagccgataatacagcaattcaggtttcgggcatttgcggggattttagggcgggtgttcatcgtgagaaactccgtcccggtcaaaatcatgttgttttcaaacttcggatcaacaaacggtttgatgtctttttccgttccccaccgagcgctgccgtattctgcatcccgccgaaacttcttagcgttcttgcttttgaaatagatcagcagccggaaaccaactgcgcctacaataccaacaagccaatccagcggggcaagaccgggtgcaaagtcagcaaaggccgggccaatcgtctggcccagcccgatgagcttatgtgcaaaatcgttacccgctgccagccggtaggccgttcccagcttgaggaacgcccacaggatgaacagatagggaatgttcggaatgagatattttctgatcttatctgtcctcatgggccacctcctttgcacgttctttctgcttcggcttttctttggaaagctgatctgccgcctgttgcagttgttcccggatgggaacacggttcgattttgctttgtttaacaccttccgggaatactcagaaaagcaggcggtcattgcgtctgcctgtccagccttgaaaaacagcaggtatttgtccggcccggttttatagaacgcatagtctacattccatttccgggccacgcggtcaaaggacttggcatccccggatagctcaatgctgttggtggctgtaccgtgggccatgagctttcgcacactttgttttccatgcggtacttgccgcccacggtatgccttgcggatcttccggcccaccatgcccagcacatacgccagtccccgcgccgtcagcttggttgtttttacggatatggctatcgtgcgccgggaaatatcttcatcaatcagttacaccgcctccttccttgggacaatttgtctcgaagtgccatcaccgatccccacggtcttttttctgcatttgacggtagccctccaaagaagaaccgtctatgatttcctgataaacggccatttgctcccggatagagagcttcgggaaagagaataccttatgctccttgggaatatcctgcaagccgtgatacacttccacgaaatgatcgctttctttgacaacatagccgcccggggcaaaatggccgttttcgtggatgcaggcatcccggccatacgcctcataatcgaaatacggttttacctgatccggcacatccaacatttccagatcgtccacataaatacgccccagcgtttcctcatcggatacgccggggtaaaagccgtaacagtccagattttgtgtcagattgatgatgtcccgcaccgaagaacagtgatcgccgctgtcgaggacggcctccagtgtttccagctccgatgaggtaagctcggaaagcaggcaggccagatgattaagctcgtccagattttcatactcgctcaaatggtcatagagccccagcacatccccatcgaaagaggtaataaaaatttcctgatagcagactccatccacgccgatccgtttcaagagagcctccacctcctgggcggttgtgggaaatttcagtgtttcacccacaagctggccctcgctgtactttccggcgttggtaacgtaggcttcaaacagggttgccattagcggcggccctgtcccttgacggacaggatgccctcaagggttgttgccgtaattcccagccgctgggccacggcaatatcatttttcatggcttcggtcatactgtgcccgcaaacaaccagcacatgagaacggcggagcaggtcacggctcatgtcgatgccgcttttatgctcctcgggaacagcatcattgagaaacaggggcaagtacagggtcgggcaaataggagaaaagcctgcctcatacacggtgcggcaatactgcgccgccagttctgcgttttcgctatcgccgccgagccatgcagcggtgatataagcaaggggtcgtttcatcgttcatacctccgatattttaataagaaagttcaacccaaaccccacgccctttcccagtcttgggaaagggggcggctctggaggatatacccccgccgcttgccggggaaatagcacagccggggcagaccgtcaagggcgagccgccgaaaacggcggtgcgctgcacccttgacggcccactcccgactgtactaaaaaacaggcggcgacgggggatatataccaccagagcctctgcgcgagggcggggccctcgggacaaagtgtctcgaagttgttacttgtcaagttcctgctttttcggggcttttgccagctccggcggctttttttctttccagtcatccagcagggacataatctgttctttcattttggcgggagtgacctccttgccaaaatacttttccagttccgcagtagaaataatcacgcctcgatcctcctttttctgttctgataagataccgtcaatgacatcgccgttaagcttgccttccttatccagcttccggagccgtttagcctgggccagcgagggcgaagcctgctccccgtcaatggaaacagcaataagcctctgatttttcggtttgatataagaaagctccacggcaggcatgaagcccatctttttatcgtctaccttatccagaagctccggcacaagggagttgagccgcaagtagcgcatgacctttttatagttcatttcatgcgcctcgcctacaatctcaaccgagcgtttcccgacatcgccttccgcaacacctttcagccgcccgccctgatgcttgatgtcctcaacctcgagttccagcagcgcggccaattcgctggggagcatcccgtcacgctgcttgttgctgtccttcatggcctgtaccgcttcgtggtcggtcatttcacggacgataaagggcatttcctccagccccgccagttcactgccgtgggtacggcgatggcccgctacaatttcatagccgtttccatctttctccgggcgggcaagaccgggaaccattacaccgtttacgcggatagaagcaacgatttcctgcatcttcgcatcgtcccgtaccttaaaggggtgcggacgaaatgtgtgaaacggatgaacctcggaaagtttcagataaaccagcttgccttcctcaaccgggcggggcggtgtggtcggctcgggagccgtctgttccgcagcagcagtttccttcggtgccgtatcctgtacgggcttaatgggctccttggcatccggggcctttccgtcacttcgggacactttgtctcgtttggacggcttgggcttgtcaggggccgccttatccgccttgggtgggcggcccttgcgggccccagccgatttatccgctttctgattttcagtcgcagccttttccgctttcggcggacggccacggcgcggctttttcggttcctccgtattggcgggctgcggtgtttctccgggggctgccgcctctggcgtttcgggggtttccgccttttcgacttcggcgcgggcgttctgcctcttttccgccataagttcattgattttgtcaaaggacacaactacatcgtcggactcaggtatggcaggcccggtctgttcctgctggggctcagacgctgcggcctgttcgggtgtggtgataggcccggcggcctccggggaagtattcaccgcagggccagtattcaatttttcatcggccatttacgatcctccttttcattaaagttgcacaaatttgaacgctaaaattttgtagttatttttgtgcctcctttccgtctatccacgcaaaaaagccgcccgtttttcatgccggacggctttttgcgtaatgtgatagatcaaatattattttttctgatttgtaggctccgaaaagccttgtatttacagtgttcctaataggaggtaatcatatgaagacgacatggtgaaatacgcggaaaagaaagacaagtcccgcatcaaggagtgcttccagtccatcccccgtcagttagccaaggaaaataagaaattccagtattctgttgtccgaaaaggctccacagctgcaaaatatgccgggagcctgcaatggatcgaggatgcgggaatcatctcccgctgctataacctctccattaccgaactgccgctagacggcaacgctgaagaggacactttcaaggtatatatgcgcgatatgggtctgttcgtcagtatgctggaagacggcacgcagtatgacattctgcagggtaatcttttcggctacaaaggtgccatctttgaaaacctgattgccgatatttttacaaagatgggacggaagctctattattttcacaaggattccggcttggaagtagattttgtaatccgctacaaaggcgagtgtacgctcgtggaagtaaaagcggcgaccggcaacatcaagagtacaaaaacgattttgaatcatccggaaaaatatcacgtcagcagcgccatcaagcttggagactataatgttggtcgcatggggcaagttctgacgcttccattgtatatggcatttctgctgagggcactgtaatacctttcttaccactttatttaatattggctgatttcagaaaaaattgcttatcgcgcagagattcgtattatagcaatcgaatacatctgtatatcttccgtcgaaaaaagggttcgcgcaaattctaattttttgacaaaggcacattctccaatacttgccacatacaacagaatagatttgcaaataaaacagtcaacgcctatgcagataactacatagccgagggattttcactatgaaagcccctcggcttttttatgtcagaatgtaggtgaaacatataccatatatcccgccgaaagtggtggcaaacacctataaagccctcgccgtcagtatcgggttatgggataaatgctgaaaacataaaaactttgtttttatttgttatccggtacaagtaagctcccatatacttgcaccgcgaggtggtaatttggcgcacagagaatttatctatatcggtaaaccgcttccaaaattggatgaaaaggagcatgccgctttctttctgaacttgcagaaaggcattcttctctccctaaagcagcgaaatctgctgacacccgctcaataccaagagtgtttagccgaactgggaaaaagagaaagcaaaaatcaaattcggaataccataaaacagaaacattcattgtgaaagaaaatttcaccgatttttacacaaatattaaattgccattgggaatcggagcgtgacaccgataatagactcacaacttggtatattatgaatctattatgctgtgatcacggcatttcgggacttcagatagatatcaatatcgtggttgatatactgatagcccgttgtgtgaagaacatcgtaaaactcgttcaagtagtcaaatacgccatactggcgaaacaattctgccgtctgtttgcccgtcagagacttatatgctttatagttttcgaggcaaaacaccgaaaaagcagcttctttgctcatgcttgctcctccttacacatcgggaaattcaattttccccgttttttcttcctgcttaaaaagcagatacagcatacccgtactgaatcgttctcgccgccggtaccattcaaaagcataaatttgtcaaagattaacaggcactcgccctatctctccataactctccataagtgttacccgtattacctttttgggatttctactttccctagctcggtctatcactccatagcactccgtaagtttagtattacgatagtataaagaaaagccttaaccattcattcgtggtcaaggctttcgtttttactgtatttcttctatttcgccagtatctttgtttacatggtattctttaaggagcataccgctgaaaagcaattttgcatcatgttcttctttgtcaacatattcatacacagacacatcgagcagatttcccatgacagagattttagttgttgtcttgtaattgaagttgactattgcatggatttcatcatcgctcttgaaatactctttgtagtagtccaaagcatagtcctgcatttcaatgttttctgcgattgaggcaattctccaattacctgtcacatcattaggaacattggtaaccacaaaggaaatatcatcttttgctgtgctttcgttttgcttttcctctgtctgctgttctgctgaactgatagtgtcctttgttccgtcctcaacgctgtcttttgttccagtatttccgaagatagcggccagaataacgacaacgattacccaaaaccaccacttcttgaaaatcggctttttgactccgtttttggttgctttatctttcataatgccatacctccaagttttggttgatattagcattatagcagagcgtaacacaaaagtacagtataattttaactcactattgtgtcatagttttatgtgccttgtcaatactataatgtaattaaaatcaatggaggaattgcattatggagaaatttatcgtaacacctaaagaagataaatctgtcaccatgacgatacgcatagatagagccttgcaagaagaatataacgatttagcagctaaaacgaatcgttctcgtaatgaactaatcagtatggctttacaatatgcccttgaccacatggaattgaaagatgaatgatgactaaatgagagcctttggattttttcctctggctctcaattatttatgcgttcaatcgtaagaactcatttacctttgttgctacttcctcttgctgttcctcaaagctatgagcatagatgttcattgtagtggaacaggttgaatgtcctaatgtctttgatatttcaatgatgttgacttccagataattgagcagggtagcacatgaatgtctcaacccatgaagcggaataatcggtaattcctctaatccctcggcctttgctttgtctggattattctgcacccattcattatagcggtgtaaatgctttgtgaaatactgataaggtgttgtatgccccataagctttccgtctgcttgaatgaacagattaccgccattgctcaaatcgccttgccatgcagtaccatgactaaatcgtgtctgtatgtactcaaagtgatactgcttcaaaagtgggattacatcatctggaatagatacctttctgacagatttctttgtcttaggttctttataatcaaatccgttttctgtcatacccacagactttgaaatagagattttcttttccttaaagtcaatgtcattccagtgcaaagcaagtgtttcgccttttctgaatccacagaacaatgagagagtaaagaacactttgtattgtgtaggcacagtataggattctgtgtactcattcacatagtatggtttacctgtatcatcaatacgctgatggcctttgtaggttacctcgtatgacatatccagagatttcataaacatcaatgcttgctttggagtaaagaactttaagccctcgtcctcgtcttttctctttggtttttgtgcgtcttggcaaggattgttctcaatcatgctgtaacgcttggctgtcttaaaaatcagattcaacacattagcaaatctctttattgtacctgcggaataatcgtcaaccagagttctataaaaggcttcaatgtgtggtgttttgatatgagcaatcttgtctcccttaaagtagggaattattctgctttccaaaacctgtttatatcctgcataggtgccataagcaatgttatctttaacactctcaagccatttgtatgcaaaatcttcaaatgacattttttctgcgttgtagtcgtagccatatttcagtttatcttccatatccatggcatacttcttcgcttctcgttcttgttgtttgggtgttgctgactgattgactgaatatgtaagattcttaaccaatttgtttccctttttatcgtatccttgacagataactatgcgataaacaactctaccgcttttgtactcaactcttttaacagatgccattcttaacaccctttctcaatttgatttttgtaacgatagaaggtcggcttcgtcatacctaattctttcatcagttcaaatggtttcttttccccttgctgtactaagcgatagtgggtagcaaattcttcaaggtccataactcttggtctgccataatcgtcccattctccacgagcttttttctgttcaatgccttctcgctgtcttttctcttttttctcaatctcagcctgtgccatgcttgcatacaactcaatcatcatattattgatagtctctaacatcatacgagccattgagttttccatagctgacaggtcaatcaatgttgtgggtaattctaacaccataacacgaataccgttgtccttaaagaatcgtaattcctttagtgtggcttccttgtttcgtcctaatcggtcaagctctgtgacgatcagcacatcaccactttcaaggatttcatctttcagcattgtgtagcgtggtcggttgaagttctttcctgtctgttggtctgtgtagaccttgcccttatacagagaaattgcattatcagcacaatacttggtgagttctgcaattcctctgtctaagtgctggtcctttgtgcttgtcctgtgataagctacatatttcattcagacacccccttatcgtataaatcacagtttccaccatcaataacggtagagggcttttcttcgtacatctcacatttagaaacattgcatggcatattcgtatcgtcatatttgtataggcaatccgtacacaccaaatcagcgtttctgataagctcaaactttagcttgtcattcttaaacttatcgttcatctgaacacctcatttctttatagaacatctgttcgtttctgattcaatcatatcaggcaagtctcaaaaagtacacactttttatgagaataatcaaaagtttttacgcatactttctgatacttatttgaggtttcatttgcatggtttcaaaaagtataaattctgataccacatcaacaagcggccatttttctcttttcttgccagtaccttttaacgctttcgctccgtctaatggaagcacttccataatgaatattctgttttggtgtgacaacttcaagattctcaatacagttatttgttttgtcctcgtccttatgattgatttgcataccctttggaataggaccaacatgagccatatacaccaagcgatgaaccaaagtctgtttatactcattttcatcattgtataagggaactcttacataaccagaactattcctatttggctttaagattttgtcattgtcgatactgtaaacctgcccgtcagtagaaataagataccttgaaaatccctctgcctgttcccattcaacaggggtattgcttttatgctgtgttgctctctttgtcattgctctcaacctccgtttcgccggtattgagaaactcaatgaatttatccacattcacaagaaacttattaccggacttaatatgcacgattttgttctgtttgcacatctgccaaagtgctttatatgaaataccagattcatctgcaagagtctgtaaaggcaccatacgaggaatgcgtacatctgatacaataaagttaaactcctgctctggtaaagtgttcgtattgtttgcattattcttctttgccattttgtattctccctttcgattagggacacgaatacaaattcatctgaactattgtattgttgtccatgtttttgtgtttgctccgtctggacaactggactattctttagtgaccgatttattttattctcaattttatgtttatccccagaggttctctgttgacttctggtgaacttttatcctataccataggaatacattaccttatgacttctgattcaatctggattatcctgtgttattctgggattatcctttatgctgtctgttcgtctggattccatgcggaaggcttcttaaacgcattaacctgtttttcaatgtttctaaggtggaatccctgcatatacacagaagcaagcccttgttcagcttctttcagttcagattctttcaatctgtcaaaagcctgttcagcagaagatttactaccctcaaaagcacgctccctaatctttgcagataccatatcagcataagcaggatatttaagcagttccagaacagccttgctaccgataacaccagaattgatagaatctgtcaaaaccttagtaatacggtttgcatgattgctgttcatcactttaggcatctgagacataagctgaagtgctttgctctgtactgcctgtgtatcgtcctgttcgtttgcatagtcataaccacgattgcggatttcctcaaccctgttattcatacggtcatacacaaaagcattttcagcaaccatatcctgtaatttgctctggagtttgtcatagatttcatttaccatgttcttatctacacgcttatacacagaaataaaatccttagcacttgcaaccagaatacgcacatcatcaatggtctttgtttttctgaactgttcaagcagtttattatagttctcaacgatagttagtccgttgtttgcaactgtattgattttagtcattttcttcttcctcccattcgatattttcgttttcgtctgacacaaccacaaagccttgttccttgtagaatgtatcatacgcacctttggttacctctgtggtaactgttccgtttgtaatcttaaccatagttattcgtcctcattttcatctggggcattgttccattcctgttcccaagcccaatcttcatcgtcctcgttttctttaccgtatggaacaatcctaatcacagtaggagcagtatcttctgtaccgtctaaaagaaaagcagtatttgcaccataagctttgtcaatgatgtacttacaagcattaaatcggtccttgttatatctgtcattggcaatctggattatgctttgcagagcttcaacggtagaagatttaagcaacctctgaaattgctccttttgtgatttctgctctgcggtttgcttaggtctgccttttggattgccgctttgtcctttagcataaggcatagaaaatcactccttcctacatatcatagatgttcacgctccttgttgtaggattccagttctctatgaatttctgttttattttgtcttgtgagagatgagataaaatctcttgtttttcctgtatctctgctttgagagattcaatcagcatattgtaagcctgtgttcccgttctgggtttgtgcttcaatgtaatgtctgctgatatgcgttctacctgcattagtgaacacccccttactgttaatgtactgttatctgtttgtatctctgtctcatataattatggacaagatttgatttttgcaatttgctcaaatgccttgtgaaacaccttttacaccccaatgaatagtggtttatgctcaatttatgagattttcagtttttcaagtttggggtcacagggtaacatcgaatgttacttttcagacctgttttatcctaaagagttgtgcatgagtttgagcgttctaagcacatcttctggaaaacccatatttttctctcgataaaatgaaacaattcgttttgagctatcaggctgtttcttgaatacataccacttctttaatgccttgcgtaatacctcagtatctacaatgagttccttacacttaatcaaagtttcgcttacttcctttcgtggagtagagtaagttaaactttcaaatatctcttgcacacaagcattcagcataggtgtaatattctttttgcatatctcgtcaaaggtttcttggtactggtcaatcagcgttttgattgctttccttgtgagaatgtcctctaatgatttcttgcttgaatacatacggtcaagcattctgtctaagaacaccaattccacacgaatcagatttgactcaactttaagattgcctgcttgcctttgctgaaaggttttgtcatacacctttaacacccattcatggggcttggttgttgtgattcctcgttctggtttcctgtgtgtttttccgtttgggtcagtttccttataaacagtaacctttgcaaatgacctttcaaacaatctaatcacatcctttggcttacaatccccaacgcattttatcgttagattgcactccatttttgtgacactcatcattgagagaaattcatcagaatacttatcctttaagtgcttttgcaaatatgacctcatgtgctcaatgacttggtttcttaccaattcgattttaatacaatcagatagttgaaatggctgcacattgtttggcctgattgcgttaggcaaattcacataagcagacagtttgccgccccaacaagatattttcattatgtcatttccagattcattcgtgagattttcctctggaagatttatactctctaagccttttattgtaagttgcagttgaaaattcattccgtctgcaccttgtagttttttctttcccattttcacacctcgcccattgctttctttatgtctttgattattgaagctgtttccttgataattgcttcgattaaagcaatgtagctttcagcataataattcctttcgtcagtctttgctccgttcatattcaatacctcacattctttgctcacatatattcatcaatgcaattcacatcaatgctgttcaagatttcccttaacttgataaactcttccttagagaaagtgataccacgcaaaggatattgcaatccgtctctgtcagatactcgccatgctctaatatcaaacacaggcttcttgtcgttccactttacaatcgacacttcctttgagaatccacgaaagcccaccatgatagtgtcaatatgttcctttacttcatactcggtaaccttaccagcattacacgcaaattcatgcttatttgttttgttatccattttccttgttcctttccttttgattttaggcaacaaaaaagagaagccagttaaacctcgtctaaaggtaactttgcttctctaagcattcaaattattaaattaactggtcttttccgacctgtatatattataccacattatttcctgaaagtacataggcaaaataaacttttttccttatttttccgactattttcttgaggtcctttttatatataatcctcagattaaccagattgaccccagattgattttaatggattaacctatattttatatatcctattcctaaaaatcaattctggattatctgggaacttctgatgataccccttaaataaacagtaatacaatagtataaagttgttatgcctatccacaaaatacaaagagaattaagggcaaataaaccgaaactcatttgttcagctttgcattgtgcagtatgagagataattgtcataaaagcctttaactgcaatactttgttgaccttttctgccttgccaaaagtgaaactcaatgctatgctttttctatattgcttgtgatgtcagtattacgcttgctgaacaaacaagcacaatctttaaaatattaacatgtaaatttcaaaattgtggacctctataataagctgattcttctattctggatctttcaaatgcatcgtattcctctggatcaaacccttgaaattcgaaatactctttaacactgttgtatggtaatttctgacccaattcagtcataatttctaaatagcaaagaatcatattattggcagcaactgctgaaaaatgaggatcttcttttgaatccatcaaaatttcttgtataaactgcatcaaatacacatcaaaaaaatccaaaatgtaaagaagtttatctttatttatagtaattttttctttacggtcccacataaattacagccccacattcttcacatacttgtttttctaatccaacattcataccataaaacacacacattacacttcctggtagtaaaaaatcgttgactacacctactcctgtcaaatcatctgccaataacaatgctgtggattcataacaatgtcctacccacctgcgcacaggaagttagtgcaacgactataaagatagcaaacatcgatatactgagtcgatttattttaagattcccttcaatgcagagatttattgcgattttcgcccattcttttgccaataaatgacaatcgtaaacattatcaagaaacacatgataatcaaaacaattattgtgggtgtctcgctactgtattgcgcagtacaatcgtataatatcgtctctctccccgtgttgtctatttttaccatctgggtatatttgtaccctgataataactcgagtattggtctgcctttttgaattttgtaagttacgcctgaaatctcgcatgttgttttgtgctctaacttttgaatactcgtttcgtttgttgctctgtcagggttaaccgctatgcacgaaaccaattctccatcttgcgtaacagtcagtaaagaatcacctcgcacaaagtaaatctgaatgtcgtctccgcaccactgtacataataattgccatatgtttgaaattcaaatgcctttaaaatttttccgcttgtgtcacagactgctattttctgtgagctaaatgccaatagaatttgatttgcaacgtcaaaacttacgatttttcccatattctccgttggctcaatctcccgaaaagaaatagaatcataaaactcttttgcatcggaatcaaaataataatccccagaaagcgcagcctccgctggcatgcataaaagcgaaaaggtcacagtcatcaacagaaatactagaactttgcttattcttttcatagtcacactccttttatgactttatcttatccagcaatttaaagatgttaaacacaaacacattatttgtatcgctccaaccagtgtgaatttctccacctgcacccgttcctatacctatgaagctgcctaatccattataaaagcgattcttttgtcccagaacagggagcgcataccaatctcctccaccgcctattgctaatgccccgataactggttctgtaattgaagctcctgaattatattttcacttctccattcttgtttatagttcggtcaaaacaccaccgttgaatccatatatattttcctttttgtatccgtataaagacccaggcaaactgatatgcggttcaaaagtgaacgcttcgacagcggacagtttttccgtgtttcctttttcaatgtagatacggtgctttttatccttaactatggaatgacccaaatttccaagaaaatcaaggttgacgtacccacgagctttaatctgatcgtttatgtagtagaacagcgcctcaaaattagtgttctcattcacgaaaccaagcatagcttcatgcagatagacttccattttaagaccatttcgccattcatcattctgtatttgctctacgtctttgacgatcttaccgttttctacaatcagagttcttgcgtaatcgccccaaatgcagttgctctgtggacttaaatctattgtaataatatcgtttggctcaattatgtggtcatctgttttatactcacgaccggatacggatacagtagtcttatcaccggcgaaaacaaaagcacctacatcccaataccaaaaggaatccgcaccgtgggagagcatatattcctcacatagtttacgaagctcaatgagcgtcatgccgggcacgataacttttgaagcatgttcaatagtggctctgttcaagttttgcatttcatgaatagtcatgttttcctcccaaaatccagtgtcgctatttgttcagcatttcaattaattcatatttcagacttcggttgaccaaaatcacggataatcccgccgtcagcaaaatcatcgccgccgggatgacgacttccaaaacgcccgtgtccgctgcgtcctccgtctccaccgcattttcgtcgcgcgcccaaaggctgtattccgtgctaaatgtgtgctcgttctgcccggttaaatcgagcgtctgcactttgtcgaacagcactgtgctcgcggtcgtgcccaaaatcaccgccacagcgctcaagaccaccacgcccgaaacaagcgacatcctgcactgatttttgctcatacctaaactccgctcgatcgccgtgcgcttcttctgctttacgataaagaaatagagcagcagcaccaaaatcgccagtgccgaaagcaatcctgccgcgaacagaatgatcgccgccgtgcgcagattttccagcccgccgacgactttgctgtacccgttgtcgtcaaaggtcaactgcaaatgcgtgcgcacgctttccggcacattttgctcatacgctgtcctatattcgtcgatcgtgccgttcgggatttgaaacgaagtggtataccggttcattgcaccgaacgcgcctatattctccgcatcggacgctgtcaccgaggccgtcggcacaataaacatgttccgcgcgatctcccccgtgccgtttttgctacccgcaaggcgaaacgtatcatatagcccgacgatctcatacgcctgctcgaagaagaccgaatacggctcgcccgccgcgtttaacagcccggggcttcggccgccgcgccactgcacctgaaagccgaattcccactgcgggctctctgccttgttcgcaaggtacagcgagagcggcacgcggtcgccgaccgcaagccctgcgctgcgcgcaaactccgcgctgaccatgcacacagccgcgccgtctgcgaactccgcgtctgtaatctctcgccctgccgataaaaacaccgtgttttcgtgaaacgacggcagcagatcgaggctttccgctgcgagcacggggtagctttgccaccgcgtgtacagcgcctgcgcccagtttcggacgatctcccacgtctcggaatcataaaactccggcgtgacctccataatcgtcggcagcgttacgccgtcgttcagccggttcccctcggcatccacctgcggcgtaccggtgatgctctgcggcacgaaaaacatgtcgcccgcgcgaaacgattgcaagctttccgcacttaacgtggcatacgcgagataacgttttcccgcttccaaattcactgtgttttcggaaagcatgtcgcaaagcttcatctcgtcgccgctgtatgtgccgtacagcacgcggttcacctgcacggtttggcggcgatcggccctcccgctttcaagcggtgtgaactcgatgacgcacctgctgccgttaaacggcggtgtgtcctgccgctccggcgcggtgtattcttccggcagaagcgccgcgtaatacgtgcgcttttcgggcccgtgcacgtatgcggcgcccggaaaatcgagcacgctttcatcatacactgtgccgtataccgactctgtttcctccgcgccaagccacaggctgtctaacgttttagttttcaccggcgcttcatagtccggcagctgctctaccgtgccaagcgttgtgaattgcttttccacagcatccatttgcgcctgtgtctgtgcccacaaatttgcccccaacaccaagagcgccgtggcggcggtcatcaggaggaagaacaagcaagttttcatcggcgtgcgaaggagttgttttaagctgtttttcatgttattccacccgtgcgctcaaaagctctatcggctcctgctttaggtttcggttcaccaaaatcacggataatcccgccgtcaatactgtcatcgctgcaggaatgacgactttcaaaacgcccgtgttctctgcgtcttctgtctccaccgcattttcgtcgcgcgcccaaaggctgtattccgtgctgaatgtgtgctcgctctgcccggttaaatcgagcgtctgcactttgtcaaacagcaccgtactcgcgaccgtgcccaaaatcaccgccacagcgctcaagaccaccacgcccgaggcaagcgacacgcggcactgatttttgctcatacccaaactccgctcaattgccgtgcgcttcttctgctttacgatgaagaaatagagcagcaacaccaaaatcgccagtgccgaaagcagtcctgccgcgaacagaatgatcgccacgtaccgcatattgagtaaaccgccgatgatctggctgtacccattgtcgtcaaacgtgatctccaaattttcccgaacctccgccggaacatttcggttatacgctgccatgtagtcgtcgatcgtgccgtttgggatttggaaggaggtcgttgcgcgctgcatcggcccgttgtctacgatattgccggcaaaatctgccttgaccgaatttgcgggaatgaggaacaaattcagcgccatttcgatggagcccgccggttttccgtatgtgcccacactgtaatacgtgccgatgatctcatactttgccgtccaaaacggcgtgtatgcccggttctgtgcgtttaaaagcgaaaacgtgcgcaggccactaccgtcgccgaacgtcctatgcggcgagtctttttcgttcacgccgtaaagcggcagctccactttatcgccgatggaaagcccgtttttccgcgcgaattcttcggaaacaagacataccgccgcaccgttttcgaggtcttccgcggaaaacgtccgcccctcccgcacatacaccgtgcggtcgtgaaagctcggcagcagcgccgtatctgtaaccggcaaaacgggcgcggtcgtgtcccacatggaaagcgcctttgaaagctccagccaatattgcccgcgctcggtctcgtaaaagcctgccgtcacttcgtcaaatgtccgtgcctgcatatcgctttcaagcaaatttccgcctgcgtcgcactgtgtggagcgctccgccgcgatcagtgcgtattcaatggagcttttcgcgttttcgtggtgattgacgatcacatttgtatacgccacatatgttttccctgcctccagtggcgcgggattttccgtccagtggtcgcaaacgtaaatttcgtattcattgttctgattttccgcttccgggtacaaaaatcgctgcacatacacttttatggggtgatccggcaccgccgtttcggcaggcgtgaattcgaccaccgggtaaaacagcgccgtgccgccgtcgcgcaccgcaagcccctgcaaatccgcaaggtaatacaggcgtttttcaggcgctttcaaataattcgcgccgtcaaaatccagaacatcggcagagatcaccgaatcatacacgggttcggcttcgctataatacgccccatcggcggcattccaccccgtgcgcatctgcgtgcggttcggcttttgctctaccgtgccgagcgttgtgaattgcttttccacagcatctatttgcgcctgtgtctgtgcccacaaatttgcccccaacaccaaaagcgccgtggcggcggtcatcaggaggaagaacaagcaagttttcatcggcgtgcgaaggagttgtttgaggctctttaacattctaccgccagccttccgtcctgcattttgtagacgacatccgcctgcgccgcgatgcccaggtcgtgcgtgacgacgatcacgcagtaattttcgtctttcacgagctttttcagcagatcaatgacgaccttgccgttctccgtatcgaggttgcccgtcggttcatccgcgaggataactttcgcgtcggacgccagcgcccgcgcgatggcgacgcgctgctgctgaccgccggagagcatcgccggcagctttctcgggtcaacgtcaccgagaccaaccgagcttaaaagctctttggctttgatttttgcctctttcgtcggcttttttgaaatttgcatcgggtacatcacattttcgagtatgttcaaagtgggaagtaggttgaaagattggtagatcaccgtcacgttctcgcgtcggtgccgttcgcttccgatctctttcagcgtttttccgttcacaatgatctcgccctcgctcggcgtgccgagacccgcgagcatcgaaagcagcgtcgttttgccactgccggactgcccgatgatcgcgtagaattttcccgcctcaaacgtgcaggagacgtttttcaacgcctgcaccttctggtatttgctctggtaggtatagctcacattttccgccgctaaaacagccatattcacgccgcctttcgttaatcgatttttgtcaaaagctccagcgcgtcaaaccgcaggagcaaaatgagcgccagcaaaacgcccacgcacgaggacgcaaggtacagcccgcagatcgtcagaatctgcccgagcgcaagccccgccgtgcaaagcaatatgggcaccgccaccgcgcagccgcacacatttgcgatgagcataccgaaaaagcacgcgcacccgcttaaaatcttcggccgcccaagcgaaagcgagatcgccatgtcccgccgcgtgctgcgcagcaaaagaaacgtcaccagcgtgacaagcacaatgacgagcgcgaaaaacggcgctaaaaaccaccgcagcaccttcaaattctgctccaacttctctgccgtctcaatgaaaagctggtcgtccaccacaagcgtgtcgccgtggcgctcatcaagcgcgttcgggtcgggctttgcaaagcctgcgccgcgcatggcatctttaaaatcgttgagtttcatcgggtcgcgcagcgcacagcggaacgagctgtaataaaatcgcagattattttccttaacgaccgtttgcagccacggcacagagacgatcatgctgcacggcaccgcgctgcccgaggcgctgtccgcgtacacgccgatgatcttcacgccctgcatgccgaggtgctcgtaccgcagcgaaaagccgtcgtcgttatagcgcgtcacgtaaaacggcatcgagagcgtgtcgcccgaattcaacccgtactgcgccgcgtagctttggctcaccacgcacagcggctctgcgttttccaaaaacgagaggtcatacccgttttcaaacgcgatgctctcctccgtcacgccgacgagcgccgaaagcccgctcaccgccgtcacggacgtgtccgcgccctgcacgtcctccgcgcggtactgctcctgaaaattcgcgcacgccgaggccgtgtacactgcgtctttgatgtccgccttcatgaggttcgcaaagtgattttcgtcgatctcgaaccccacggtgcgcgcaccgctgcggctgaccacctgcgccgtcaccgggatgacctgcgccagattttcctccgcgctctccgccgtctggatgctgccgaggtaaaacgacatgcagcacacaagcagcgccgcaatgcaaacagaaagcgccgtccgcccgcggttgcgaaaaacaatgtagttcatttctttcaaaatcaccatatatatttctccatatcataaacaagataccgtaattccatcacaaaccgcgttacctttaaagtcaaatgacactctggccaaacctcaaatttcaaaatttctcatatggttaacttgctgttaatatatcttattaacggaaaccagtcaatacatttatcacgaaacgacaaaaaagcgcttattttgattgatttattggcgaatttgattttttaaaagcaaaaaaagacaagcgtttttaacgctggtctttctttgcttaaacttcaatatctattaattgaacctatgttaaatttcaattatcacataaaattttcttttctcatcttcataaaacgcgtgaaagcttccgcctttttggcgaacgaccctttattttttcttctctcaacacaaatgatctcgtcggcgcgaagctttagaccaccgtccactgtacacacatgaatatatacagtttccatatgaagctgctttagcgccgccgacaagctgcggcaaaatctgttttcgtcaataggtttggataaataccgataaacatggaaattcattgcttcatcaagataatcggggaatgaagtgataataatgatcttaacatacgcgtttttttgcatcaattccgcaccgacgtgaatcccacttcgccccggcatttcgacatccaaaaaagcaatatcaggtgtgattcccgaatagatcagctccttaaaaaataatgataatatagttattgtttctctttcttaaccgatttatttcttaccaatctttctatcaaaataaatataacgcctaaaaatataccgaacccaacaattacaagagtcattgcttgcatttttcccgcatattgaagtagctctgttgattccctactcgattttgccagtatgttcaatgcggaaaaaatctctccaaactcccgcatataataggcggcgtccgtaatgcggtattgcggcaggagagaggacggcagatcgatgtgcagcaggataagcggcacggcgaacagggcgagaacacctaaaacaccgtggaaaatgagctttgcacggttctctttcgctttgcgcgagagaacgaaagaataaacccacagaatcaagacgaaaagcgagcgcgaaagcaatgcggccaaaagcggcaactgcgaaagaaagcttttaacgtctgaaagactgtaaaagctgccggcgttttcatttgcgagttccgtcacgagtaaaattgtgcttttcgcgcggtctgccataaacggctgcggggtgtccgtcacgttaaacagcaatgcgttttcggcttctgcggtcggtgtgagggcgcctgaaagctgcgggatgccctccgggaatatggcaagccatgtgtcgtcccggttctccaaatcggatttgattgaaatttcgtcgccgctgcgcaggggctttgaagcgtaacggacatagctgccgaaaaacttcaaattaagctgattttcgcccacggaataattattgatttcttcttcataaatgcgcgtgccagtctcccagccggtgccttctctcgggcggtagaggtgcatgcccgtatcgtcgaagaaaagggagtcgagcgcgatgtgcggggagggttcgctttcgtccgcttgcgtgagcaccacttccgggatcatgagctgctcaatgcgcacggaaagcatcgtgcagaaaacgaggccccataagatcaaaacaaaaatgcagagaacgcggcgtttcatatcacttcacctccgctaaaacgatgccttccacaagctcgcggttgaagaaggtgaagaggaacagcgcgggcagcacaaccagaatgcagcagacgagctgcacggaggtctcgctcggcggtgtataggcgagcgccaccgagatggggtactgctcggcttctttcaaaaatgcgatgggctgctccaccatgttccatgcgtcgaggaaggagagcagcaaaacgcacacaaggccgcttttgttcatcggcgagacgacgtaaaacaacatgcgcagcacgccgcagccgtccagcatggcggcatccagaacggtgtccggcaccgatttaaagctttgcgttaaaataaacgtgccgagcggcacgataatagacggtaagatcagcgctgcgtaggtattcagcaggttcatgtagcccagcatgatgaaatcgggcacgagcgtgacctgcacaggcagcgtcatgaggatcattaagaggaagaaaaggaagttgcggcccgggaacttatactttgcaaacccgaacccggcaaaaacggagatcaaaagctgccccgcggcgatgcacacggccatgccgatgcttttccaaaagcggaaaagatattttggggaagccagaaaaacgtcataataatactggaacgtaacgccgccaggcgacagaaaactacgcacgaacacgtacaaaaacggcgcagcggataacaccacgaccaaagcggcaaacagcccggagaaaaaccgtttcactcgcggaacgcctcctttcggctgacaaacgcatagaataagccaaagaatacgataatgacgatcaacaataagaccgaagccacggagagcttctggtaattgaggttgctgaagcagttgttgatgaaatgctggagcatgtagagctcatccacggggtgctcgccgccgataagaaagatctcgcggaagcacttaaatgcgttgatgacggagaagatcagggcgaaaaacacggaataccacatttgcggcgtggtgatgtagcggaacttctgaaacgccgaagcgccgtcgagatcggcggattcgtactgctccgcggggacggtgacgagccctgcgagcagcagaataacgctgtaccccgtgtttttccagaggtacatgaggatcatgacccagaaggcgtatttgccgttcagccactcgacgatgggcaggtttaacacggcaaacaagccgtttacagcgcccttttcgccgaaaagcagatcgatgagcaagactgcaccggcgacgggcatgatatacggaaacaaaaagacagattttaatagcttatgcttgcccgcctgcttttgcatgaggagtgccaaaagataggagagcagcatgatgagcggcagccctatggctaaaaacttcatcgtgttgaaaaacgccagacggaaaaggtcgttttggaacatcttcgtataatgctccatgccgacgaacatgccggcggcgccgtagccctgcgtaaacgaatagcgcagcacaatgccgaacgggatgagcgtgaacacaaggcagccgatcatcaccggggcgatcaggatatatccgtgaaatgcttttctcataaggcaccgccttttattttattcctgcacccactgctccatggtcttgtaccattcggcaatgatgggcgcgaggtcggcattactatacttttctaatcttataaacgagttttgcataaattttgtaaaacgcattattcagagagtctggtttgcagcgcttctatcacgctgtgcgcagcggcagcgcaatccgggttttcttcccacgtcagggtcgtggcggtatcgtaaatggtgtagtccatcacggagtagaaccgcacagcgttgacgcggctttgcacgctttcaagcagttcgggctgcagataggcgtttttgtgcgtcaagaaactgtttaggttgccgagcatcaaaagcgtaccgcgcgcatcgttcacggtttccgtgtcgatttgcgcttcgtcgctgaacagcagctcgaagaagcggaatacctcatcggcctttgggctgttgcgattgatggctgcgtaggaggtaataaacgcggtcacgccccttcggtgttcggaatggcaagggcgttcacggtgtcttgattctgtgcgtaatacgccatgccttcatcggtctgcgcataggatccgctttggatcagtgcggtctcctcgtcaaagctttccgacgcaggcatggcaagaagatcttcaaactgcgcggtgaggttttcctcggtgagaattgttttttcggtggcgtaatctgcaatacgaggaattccggcgccgcaccaagtgtagagattgttgcgcacaactttcagaacggccgtgtcatcacagtttacaagctcgtcccatgttttgggggtgaaatcggggtcggcaagctgtgctttatcgaggagaaaaacgcttgcgtagtacgtgataggcagcacgacctgtccttcgtcggtttttccggtatcgaaaacagaggcaaagtggtcttcggagcagaggtattcgctttcttttatataatcgtcaagcggcagaaaagcgccggcctgcatggtgcgctgcacatccgggaacaacgtggccgggtgaccttcaccattgaaagtcatgtttgaggtcggggaagaaagcagatagccgtccggcccgccacctgccatgatctccacgcgcaaggaggagatctgcgtttcgcgctcctgcgtatcctcggagaggacgaaaaactcaacattcaaatcgccgtagatttcttttgcaagccgcgttatgccgttttcgtgcgtaaattcctgctcatccgtcacgatcaccgctttttcgctcgatttgctcgcggtgctgtccgttgaagccgaagcggaagacgtagccgaaggcgccgcgccgccgcagccgcagaccgcctgcgtgagcagcatggcagacaaaagaatggcaaatttgcgtttcatagattttcctcctctaaattcgtgacgtattgtaaactaaaatgaaaattgagaaccactcagaccctctggtataatggtttcaccacaaaacacatatctcccaaaaaagagggttctcatgatgaaatcataccatatttagtgtccaaaatgcaacaaaaatcattcattttatcgttacggcaaaaatcctgatgggtattagaagtatctctgcaagaggggcggcttttagcttcatattatcattcttctttaattttgtacgtattttttgcgcgaattgattattttgttgatttagtccataattagcaaattcaaatcaagcttttttgtaggccaagcatttttaatgcttttagagaaaaataaaaaacaacgctatgatgattcataaaaatcgccatagcgttattttactcttattaaaattaaactttataacacctttaattagcacatttctcaaaacagtacataccagatgatcttcattaaccagaggaatgcccatgctttcctttgcaatctccaaaaacatctttatctcaccacagattccgtcgttctgcttgagcaaatacgtgttttggataagcaacggctgcaagcccgattaggcagactgccgtattcctatattcagaaaatcgataaagccctcgccgtaagtatcgggttatgggataaatgctgaaaacacaaagattttgtttgttatccggtacaagtaagctcccatatacttgcaccacgaggtggtaatttggcgcacagagaatttatctatatcggtgaaccgcttccaaaattggatgaaaaggagcatgcagctttctttctgaacttgcagaaaggcatccttctctccctaaagcagcgaaatctgctgacacccgctcaataccaagagtgtttagccgaattggaaaaaagagaaagcaaaaatcaaatctgtaataccataaaacagaaacattccttgtgaaagaaaatttcaccgatttttacacgaatatttaactgccaacagcattctctaatgtgatcgagaaaattaacaacttcagggggcgggattgtggaaagctctccggaacaaactgtaaaaacaaatttgcacattcgacaaaccaattttcgctttctataataataggcacagaaacattcactgtaaaaggaggacttatatgaaccgatatgaacgcatgaatcaagagcgaaaaatagtcgatatgcgaaagcgtgtggctgcctattgccgcgtttccaccgaccacgaagatcaggcaaattcctttgagagccagcagcggtatttcaggcaatatattgagcgcaaccccgattgggagctttacgagattttcgcagacgaaggcatctccggcaccaacaccaaaaagcgcagcgaattcaagcgcatgatcgcctgcgccaaagagggcgatttcgatttgatcatcacgaaagagatttcccgttttgcgagaaatacgctcgacagcatctattacacgcgtgacctcaaaaagcacggcgtcggcgtgatttttatgaacgacaacatcaacaccttagacggagatgcagagcttcgcttggcaatcatgtcttccattgcgcaggaggaaagccgtaagacgtccgaacgtgtgaagtgggggcaaaaacgccagatggaacaaggcgttgtgttcggcagaagcatgttgggctacgatgttaaagacggcaaaatgacggtaaatgaagacggcgccaaaatcgtgcggcttatcttccataagtttgcaaacgaaaacaagggcacacacgtcatcgcacgcgagcttcgcgaagcaggcatcacgcctatgcgcgtcaaagagtggagcaacaccgtcattttgcgcgtgatccgcaacgaaaagtattgcggcgacctcgtgcaaaagaaaactttcacgccggattttctctctcacgaaaagaaatataaccgcggcgaagaagaatttgtcatcatcaaagaccaccacgaacccatcgtttcccgagagctttttgagaaagccaatcgtattttagatgaaaaatccctaacgcaggaaggcaaggcaaagcacagcaaccgttatccgttctccggcaaaatcaagtgcggctgctgcggctccagctatgtggcaagatataaaaatcgaaataacggaacccgctacaaagcatggcgatgctacaagtccgctacacaaggcagcccgcacaccgataaagccgggaatccgcttggctgctcaaatccaagcatccgcaatgaagatgccgttcatatcatgtacctcgtgacccgcagcctgcaattagaggaaaagaaaatcaccgctaatttgctttcggtcattcaatccgtgctttccgtaaacaccgactattcgcatattgaaaaactcaaagagcaaattcaatccgtcgaagataagcgcacgcagctgatcgacctgtgcatatccggcgcgatcaccaagcaggaattcatcacgaaacgcgaagcctgcgataaggagatctccgagctgcaagatacgatcagcggcatagaccagcagcacctcctcgccgatcagcaggaaagcgtgatgaaagaaatcaccgctgccattcatgaaatcgtcagcggtgtggaatatgaagatgcgttttattcgcagattttagaaaaaatggtggttcaaagtaaggataccgtcgatgtttacctgaatttgctcccgattaagtggagttacgccgtcgcaaaggcctcaaaaggcgttttagaccccaaaagcggcatttctgaaacagagataccgatatccgtcaatatcgcccgaagctccgggtagggcatggagtagcgctggctgaggtagcgcagggaagcgcctaattctccgtgagggccgccgtattggcttatgatgagctttgcgagcgcggggttcgggtttttgatgcgtacggggtactgcagctttttctcataaatccacattactcgttcgcctccgtttcccacggccacgggtcgctgatccacgcccagcggctcgttgcgcgcgaagtctcgtttaaggggccgtacgctttttcgtactcgaccgtaagcttatcgtattcctcgcggtaagcagcaagctttttcgccgcttctttgcaatacggatgcgaatccagatacaaatgcagctcccacatcgcgaactgcacggcggaaatgtgccgccttaaacgctgctgttcgttcaccgcggctcaccccgccttccgtaaaacggtttattcaaaaccgggaacagtgtaccgtcatcgagcgcgcgcgccggctcgtaggtttcgctccactgctgaaacggcacgtaggctatgccgggcacagggtcctcgggcagcggcgtacaggtggtgcggcagccgcgcagcatggtgttttcatctgccatgtgctgtgtctcctttcaaactatacttgcaagacaagcttgcagttcatagtatgaaaacggagcgcagcgtgtgcatcatgcgccgtggcgcggaccggacttttcccccttcttttcggaaacacgctgccacaaaacggcgagcataaagccaaacgccaccgcaagcagcacgatggcggccgtaacaagacggtctgtctgtgccgcacgggcgtttttctccgcttccgtctgggtcagatccgcgtcgcgcgcttctcctgtcacaacggttgtttcggccggtgcttcttctacattggcttcggcggcttcactttctgcaggcttttcactgcttgccgcgtcttttccctttgcggcggacgacgtgcccgtctttcctgtcaccgccgtcacgggttttttctcacgcgtgacggccacggtgtacactgccgtttcgccactttcgggcgtcacggtgaattcaaaatcgactgtactgccgcccgcgccgagatttttgcggttcacgcgcacagcgcagccctctgtcggctgggcgtcgaaaacgagtgacgtgacggaaaacggcaccgagagcgaatattggaacatctccgggtcaaaactcggggaaagcgtgcccgtcggcgggatgagcgaaagcagtgccgcgccgatctccggctctttcacgtaagtgaacgtcttttccgtcgtctgcaccgtatctattagttcttgccccacagcattcgccgcatcggtcacggaaaagctgaccgtcaccgcatcaaactccgcgccgcgctccgtgcggaacaccagcgtgaacggctccgtgagtacgccgccgtccttcgccgtgtaaacgagcgcaaaacgtccgtcctgctgcgaggtatacacgtggcgcgatttcacactttccggcaactcggccttcgcattggctatgacttccgcgtcaaaatccgcaaacaacacgaacgcgccgatgtccccgcgcgccggcgtgcaggtcacggcgaacgatccgccgggacgcacctcttctgcctgtgctgcgaatgcgaacagcggctccatctcttctgccatggccgaaacacccggcgcaaaaagaaacaggagcgcgcacagaagaaaccacgcgccaaagtcgtgcttcttcatagtgcacctcctgcaaatcatttttatattgcttttagtatagaaaccgccgagcacactgtcaataagttgtgaactttaatcactttttctgttcaaaagttctatcagcttctgctccctttctgcggggctgcacccgtttttttcagtatagcacagcgtcattttccgtgcaatgttttttcaaaagaaaaaagtgtaggtttaacaatttcgtaaaaaacgcataacacaaaaagcgaaaagtaccactatactgataatcgaaaagaaaagatgaatacaaagaggtggttcccttggaacataaagtgaacacgataaacgtgaaaacatgcagcttttaagacgaaaacatcacaacaaagaggagaatgacttatgtttgacatgagaccgtatcgtaacaataatgatagaagaaacaacctgagtgcttacaacccgttccgtgaaatggacgcgtttgagcgtaatttctttaacgatccgttcggcagctggttcgaccacagcgcgctcgcatcgttcaagaccgacatcaaggataacggcgacagctacacgctggaggccgacctgccgggctttgacaagaaggacatccatctcgatgtcaacggcgacacgctgaccattcacgccgagcgcaaggcagagcaggaagaaaaggacgacaagaacaactacgtccgctgcgagcgctcctttggctcgtacagccgtcagtttgacctgagcagcgtagacgccgaccacatgaaggcgacctacgacaacggcgttttgaagcttgaaatgccgaagaaggccctgccggacagcgcgcgccacattgaaattgaataagcctaccgtcctttgacgcagaataatatagaatgaaacggggagccgtgcgtgtaccttgcgcggctccccgtttctgttttatttcagcgtttccactgcggatttctccaccggcagtgttgccttatagcgctccaggaacttctcaaagccctgcatgtcggcttcatccggctctgcggtctcgctctttgcctcggcaaaaatgttcttattgaggtaatcctccagcgtttcgccgtcctctgcgttcacaaggtaagaagccagcagcgccatgccccacgggccgccctcgcccgccgtttccatcacggagaccggcgtatgcagcgcacctgccatcagcttttgacccacacccttcgccttgaagaacccgccgtggccaagcagcgaatcaacctccgcgtgctccttttcaatcagaatatccatgccgattttcaatgtcgccatcgcggagtaaagctgcgtgcgcgcaaagttctggaacgtgaacgcgctgtccggcaggcgcataaacagcggtctgccctcctccatgccggtgatcggctcgccggagaagtagttgcacgaaacgagcccgccgcaatcggcgtcgccctttaaagcctcaaagaacatcgtatcaagcgcctgcggcatggagcacttcgcgccgatgagctccgcaaacgacttaaacagccccgcccacgcgttgatgtcggacgtgcagttgttgcaatgcaccatcgcaacgggcttgccggtcggcgtcgtcaccatgtcgatctccgtatgtactttagaaagtgccttttcgagcacgatcatcgcaaaaacagacgtgcctgcggagatattgcccgtgcgcacacggacgctgtttgttgccgtcatgcccgtgccggcgtcaccttccggcgggcacagcggcgcaccgggctttaaggtgccggtggggtcaagcaaaagcgcacccgcgtcggtcagctcgcccgcgtcctcgcccgcaaggcgaatctgcggcagaatgtcgcgcagccgccacggcaggttgtgctccttgtgcagaatatcaaacgtgtccatcatgccggaatcgtacacgttgtgctcgctgtcaatggggaacatgccggaggcatcgccgatgccgagcaccttctcacccgtcagcttccagtgcacatagcccgcaagcgtcgtgatgaacgcaatgtccttcacatgcggctcgttgtttaaaatcgcctgatgcagatgtgcaatgctccagcgctgcggaatgttgaagccaaagcgcgacgtaaggtcggcagcggcctcctccgtcatggtattgcgccatgtgcggaacggcacaagcagctcgccctcgcggtcaaacgccaaatagccgtgcatcatcgcggaaaaccccagcgccttcaaatgcgtaatcttctcgccgtatttctcctctaccgatgccgcaaggttcttgtagctctcctgaatgccgtgccaaacgtcgtccatgtggtacgtccacacaccttgctccaagcggttttcccagtcatagctgccggaagccagcacctcgccgtgcggcccgatgagcaccgccttgatgcgtgtagagccaagctccaaaccgaataccgcttcgcccccgcggatcagcgcggcagtctcgttgcgttccatatatacccgtcctttcacggcaaacccgccgtttgtgtgattttctcattccgtcactcgtatcacttgtacgaacaactctatataatcataccgaaaatcatcgcatttttcaagagaaaactttgccgaaattcctctgcggaatttgtatcgtgtgtgaaaccgtttgcttcaaaacaaaaaatgttccaaaacgaacttccctcttgattttttcctcaatttatattagaatagataacacagcaaaatgaatacgcgggcgtagtttaatggtagaacatcagcttcccaagctgaatacgagggttcgattcccttcgcccgctccaaaaaccacgagtctttttgattcgtggttttttcttttgaaaaaagcttttgcacatttcaaagcttcttcttttccaaaatcgttagtgaatgccgtttcgtttctaaaactattcatcaaaatattttttgcagaaaatgcagcgaaagtttcctttttcagggaaacttttgccgtgttttcctctataggtagaaagacttcattttacttatagaggagatgtaaaaatgactgaagagaatcgagaatatcgcacaagtcaaatcatgctaagaaaccagtttcatggcaaagacaaatttaagattcctattattcccaaaggaaatttcggggataaagactttcaaaatctgctgttaatcggctttgaccgcaccaacatcagagatgagcatcacttaaaccgcatggttcatttctttttatatgattataaatttgaacggatatggaaaaaaccggactatgatatagaaaaactgaaacgctacagagccgttctatctccagatttcagtatctatagagagatgaacccttcaatgcagctttataacacttttagaaaccgctggtgcggcgcatattttgcttcaaaaggaattcgggttattccaaccgtaagttggggagacgaaaatacctttgatttctgtttcaagggcattccaaaggggagtgttgtggcggtatccacttacatggtttctgagcatggcaatcacgccgatcaaaaagactttttcctaaaaggttatcgcgaaatgcttcggcaaatcgaacccgaacggattatttgttacaataccccatttcctgaaatggaaggcaacatcatttttgtagattatgaactttcttcttggaaatatcaaaaccatagcaagtcttcaaaatatgcaaaatatctcacaggacagttgtctcctgtcaaaagccgtgctatactgataaaaagaggttatgtattcccccagcaagaagaaaaaggcatgggcagtgcttatggcggcgaatggaaacctaagaaaccggacgatgaaagatttataggtaaaccgggagaaattaaaactaccaaagacaaaaatggaaatcttcgacttaccaaaatcggtgaagatggcaaagcggtttcagaacgacatttttcggatcacggttacccacgccaccattccataccgcacgaccacgaactagtctgggaacacaaccattttcattggggcgacactaaaaattattgggacggaaatgtccccgaattcaaacaatatggaggtaacgatatggacactatttttcctgcttgcaacactctggaagacgatcgttttgaatctattgcggaattcaaggactgcatagggcgcggagatgaaattgaattcgaatggaaaggcgttcatttcggaatgagcggctgccaaccgaaaccggagcatcggatcatggcctatctctggaaccagccggataccgaacaatactttgatacgccggacgacgcgctggaatacatcgttgccggagaccgcctgcgcgacatcatcacacagatagacgttctctcgcgtgctttttgattaaccaagcgaaatattccgaagctcaacccaaaaccaatcatacaaaaagctcccgcaagttttctccgcgggagcttttgctattatcacttattctcttttttccgctgcaaaacggtctcgcgcagcgcgcaatatttatcggcaaggcacaaaacagccgtttctttgaaccgcggcggggcgggatttaacggaaacatgtgctttttgatcatgtctcgctccgtgtcattcagctcaaagtcgcggtcggcattgcgcagggccgttctggcgtgccgaaacccgtgcagcctgtgcgcgggatcgggcgtgtgccaatcgtagaggaaataatcgtgcagcaaagcgccgcgcacaagagcgcgctggttcacttttaggtgcagccgatgcacaagccacaggcacacaagcgccacgcacacggagtgctcaaacacgctcacagacccgtgctgcatgttctcttttgcaatctgcatacccggggatttcaaaatatcaccgccgtgcaaaaacagcgtgcgcaaagtggggcgcatcagtttgctcccccggcaggaaactccgccttgatcttcgcgagcacatcgacatctgcggggcagaacacaacgtcgtcgatctccccgggcgtgatccagcgaaaatcctgatgctcaagccgctgcggttcgccctctgtgatcttcgcgttatagacaaacaggtgcacgaacagatccgggtaatcatgcagcacgtccgtaaaaagcgtgcccacttctaccgtaacgccgatctcttccctgcactcgcggatgagggcttcctcgttcgtttcattcggctccgttttgccgccgatgaattcccacatgcctgcgcgggctttgccttccggccgctgcccgatgagaaatttatttccctcacgcacaaacgccgccactacggtgacgcttcttttattctccactaagaagacctcccgtcttttgtaaaacaaaccgaatgcagcgcatatctctgcattttcattatagcacgcaaaaccgggaattcaactgaaaagtttcttacaatacgcaaaacgggcacaacctgtttccaagttgtgcccgcctttcaggaggtagaggcaacaccgaacaaagaacgcctatcggtgctgcctccatgtttatggttaacggaggcctcgcggtctttacttctgtgcgtgcatacagccgccgcggcaagccgcgcagttgccgccgcaggaggacttgccgtttttcttatcccgcctcattgattttacgatcgcagcgacgatgagaacaacgaccagtaacacgattatcgttcctatgttttgcgaaagccaagtcagcataacgatctctcctttcggcttggataattcctgaatttgcgaatttaaattacggagtaaaattacttaaccttaacggctctgttggacagcgtggtgctctccttatacgggcgaaccagcaggaagataaagagcacgatgagcacgatggaaacgatgatgccgaagacattcgccgtgccgagtgcaatgctgccgagctggttgatgacgaacgctacaagataagcaaagccgcactgataaccgattgcgaaccaggtccactttgcgttgttcatctcacgcttgattgcaccgattgccgcaaagcaaggcgcgcacaggaggttgaacgcaaggaacgcatagccgctgaccaccgtgaagtgggaagccatgttgctgtaaaccgtgccgtcaccgccgccatagaggataccaagcgtaccgacaatgttctccttcgcaacaagaccggtgatggaagccacagcggcctgccagttgccccagccaagcggtgcaaagatccaagcaatcgcgttgccgatggtagcaagaatgctgttgctgatctcgtcttcggtgagcattctgaacgcgccgtcaacaacaccgaaataggtggtgaaccaaacaatgatggtagacagaaggatgatggtgcctgccttcttaatgaaggaccagccgcgctcccacatagaacggagcacattgctgacggtcggccagtggtaagccggcagttccataacgaacggagccggatcgcccgcaaacatcttcgtcttcttcagaatgataccggagcagataatcgctacaatgccgaggaaatatgcgctcggagcaacccacggtgcgccgccgaagatagcacccgcgatcattgcgatgaacggaagcttggcgccgcaggggatgaacgtggtcgtcatgatggtcatacggcggtcacgctcgttttcaatcgtacgggaagccatgatgcccggcacgccgcagcctgtaccgatgaggatcggaatgaaggacttgccggaaaggccgaacttacggaagatacggtccataacgaacgcgatacgcgccatgtaaccgcaagactcgaggaatgcaaggaagatgaacagaacgagcatctgcggaacgaagccgagaactgcgccaacaccggctacgataccgtccaggatgaggcccttcagccagtctgcgcaatttacagcgtccagaccgctttcgatgatacccggcagacccggaacccaaacgccgtaatcggccggatccggctcttcgcagccgtaggacgtataggttgcaaccgcttccttgagctctgcgcctgtgtaagtgacatcctcttccgccagcgtttcttcatcaacgagggtgtaatccgctgttgcgtcgtcagaaacggaagctgcaaacgtatccagcgcagaagccgctgccgacgcgtcaaacgtgtcgctctcggtgtcgatggcgtctgcaacgtcgtccgcaccttcagccgttacgaatgcgtcgatgacatttgccgcatcgccgaactcaccggaaacgtcttcgtactcgcctgcgccgatgccgaacagatgccaaccgtcgccgaacacgccgtcgttcgcccagtctgtcgcaaccgtaccgaccgtcgtaacggaaatgtaataaacaataaacatcacaactgcaaagatcggcagagccagaatacggttcgttacgaccttatcgatcttatcggaaacggtaagaccgccgttgttctttttcttgtagcactgcttgatgatggaagcaatgtaaacatagcgctcgttcgtgatgatgctttccgcgtcgtcgtcaagctctttttcagccgcttcaatgtccgtttcaatgtgcttgcgattgtcctgcgtaaggcccagctgctcaatgattttctcgtcgcgctcaaagatcttaatcgcgaagaagcgctgctgctcctcggggagggtatgtacggcaacctcttcaatgtgtgcaatcgcatgctcaaccacaccgctgaagctgtgctgcggaatcgtcttcgtgttctgggctgcatggatagcggcttctgctgcttcctcaatgccggtgcccttcaaagcggaaatctcaacgaccttgcagccgagcgccttgcccagtgcgttggtgtcgatcttgtcgccgttcttatttacgacgtccatcatgttgaccgcaacaacgaccggaataccgagctcaacgagctgggtggtcaggtagaggttgcgctcaaggttcgtaccatcgataatattaaggatggcttcaggtctctcctgaatgaggtagttacgtgcaacaacttcttccagcgtgtacggagaaagggagtagatacccggcaagtccgtgatcacaacgtcgtcgtgcttcttcagcttgccttccttcttctcgaccgtaacgcccggccagttgccgacgaactggttggagccggtcagcgcgttgaacagcgttgttttaccgcagttcgggttgccggcaagggcaattttgatcttcatctgttactcatatccttccgataagattaaacccaaaggttagaatttactaaccttcgagcaaaaattaacacattaaactgacaaaggcagcagcaaacggggatggtgctcgagatgcgccgtcagatttttcgtcaggctgtacggaaagcccgcaggcaggctgacgcctgtcaagggatttacgtccggcatggcggaaaatatgcaagcagatcgagtaccaagccgtcaggcgtgccctgtttggtggtgccttactcgacctcgatcatctcggcatccgctttgcgcagggaaagctcatagccgcgaaccgttacttccaccgggtcgccgagcggcgcaaccttgcggacgaaaacgtccacgcccttcgtgatgcccatgtccatgatgcggcgctttacggcaccctcgccatgcagacgaacaaccttgcaggtctcgccgatcttgacttctttcagtgtcttcattggttcttcctccttatatcatgatcttagcggccatctcgcggctgattgctacacgagagtccttaatgttaacaatgatatttccgcccatggaggtgatgaccttcacggcggcgccggctacaaagccgaggttttcgaggtgagcacggacttccgcttttccgcctacctgcttgatgatgttttcttcgccctctgtggcaaatgacaacggcatcacagtttttccctctttcctgaaaattctccgcgccgagacggcacggttaggctgcacaaattagtttttgctaacccagatgctgtaaaataggttagatttctctaaccgtcactaatcataccgccccattcaaaatttgtcaacactttttgccccaaaaagacgcgctcagccccattttcggcgtttagacaaacacaaagttagttgtagcaaacacctttgtgcagactgcgcaattttttcggttcaaagccgcataacgcgtctgttcggggccaaactgtgttattgtacatgaaaatgtcgccttttgcccctttggcataaaccgtgccgcggcagaaaatttgcatacctgcctgcccaaataagcaggaagcagcgatgcaacttgtaaattcaaagtgttttttgatgaaatccacaaataaatgcaatttcggtttaaacatctttcaaattatgatgcttgtttttttgccggaagacgtatagaataataggcacaaagtgttgatggagacaagcgcacggcatcttcctcaaagcgagcggcgggtggtgaaagcgccgcaggcaaccccgtgtgatcatccctccggagcagcagcttccaaagagaacgagtagaggctgacgggttcttcccgttacagaagaaggaattgctggattccgttaagtgcagggcaaacgccctgaattcaggtggtaccgcgtgacttacacgtcctgaaggtcttaaagagactttcaggatttttttattttgaagcagtaccgcgcaaagaacgcctgacggctcagcacacaatatgcttgcatattttccgccattccgcacataaatcccttgacaggcgccagcctgcctgcggaatttctgtacgccctgacgaaaaatctgtttacgcatcttgtgcactgtcttcgcgtggtactgcttctttactccactgttccacaccctaacttccagtaaagcgtttttttcattttcttatttcaatttatttaagcgatctcaaaaggagatccaaaggagcgtttatcatggaaaactacaatgtcaattacagcgtacatctgccgagctattccatcggcccggattgctacaacgaagtgccgtatgtcacacgcttcttcggcaaaacggctgttgtcctcggcggcgagaccgctatggaaaaagcaaagccggcgctgcttaaaggcgtagaaggctccgacgtcgagcttttgggcttcctcccctacggcggcgattccacctacgaaaacggcgatgcgcttatcgcaaacccgctcgtgcaaaaagccgacatgatttttgccatgggcggcggccgcgcctgcgataccggcaagtatgtcgccgataagctcgataagccgcttttcaccttcccgaccgttgcgtcgaactgcgcttccgtcaccgccatctccgtgatctataatacagacggctccttccgcgagtattattacccgaagctcacaaaccactgcttcatcaattccgccgtcattgcagattccccggagcagctcctttgggccggcatcggcgacgcgctgagcaaggagtgtgaagccatcttctcatcgaaagacgacacgctcgcccacaccccgctcatgggccgacaggtcagccgcgtctgcaccgatccgctcgtgcagtacggcaaagaggcgctcacttccatccgcaacaaaacggcatccttcgcgctcgaccaggtcacgctcgatatcatcgtttccaccggcatcgtctccaacatgatgaccaccgtaaatgattattattacaactccacgctcgcccactgcgtctactacggctccaccgtcacagagcacggccaccatcacctgcacggcgaggtcgtttcgctcggcgtgctgtgcctcttagagcatgccggccagttcgaggaagaagaccgcctgatgcagttcaacgattccatcggcctgccggtctgcttcgacgacgtggaaatccaggaatccgagttcgacaaaatggcggataaattcatgcagacgaccgagtgggcgcacatgccgcagggcgttacgcgtgagaacttcctcgagtccatgcgccgcgaaaacgccaagggtcgtgctttcaaagccgcaaagaaatgatttaaggatcctataaaaggtaagaaaacgaaacagggcggcacgagttcgtctctgccgcctgttttacgctcaaaaagaggtaatttcctatgtccgcattacagaaattcaaaacattcttctccaaaaatgtgctcttgtgtttgacggtccccatggtcgtcttctccctgcttgttccgcagccgtttgtgtggatgggccagaacatctcgattgacctttccggcatcccgttcctgaaagaaaacttcccgagcttcggcttcgtcaacatgctcctgtgcgtcatcatgttcggtatgggcatgacgcttaaagccgacgacttcaagtacatcctcaaaaagccgaccgatgtgcttatcggcatttgcagccagtacgtcttcatggcaggcttcggctggcttgtcgcatcgctgctgtccctcacgggtgtgggtgaccccaccgtccgcgcacagattgccgtcggcctcgttctgctcggctgcgtacccggcggcaccgcgtcaaacgtcatgacgttccttgcaaagggtgacgtggcgctctccatcaccatcaccatgtgcaccacattgcttgcgccggtgctcaccccgtccctcacgctcatgctcgccggtcagtggattgacgtcaacttctggaacatgttcatcagcatcgtgctcgtcgtcctgctgccgatcctcctcggtatcgccgtacacaccgcgctcggcgaccgcgtaaacggccttaaagatttccttgtcaaggcttccaccgcctgcatcatcctcgtggaaggtctgtgcgtcggcccaaaccgagaccagttcacaacccacggcgtcaccgtcgtgctcgttaccgtgctcgccgttgcgctgcaccatgtgctcggtctgctcgcgggctacgtcaccgccaaggtgttccgcttcaacgaaaagaaggtccgcacgctgtcgcttgaggttggtctgcagaactccggcctttcctgcacgctcgcaaagaccgcgttcccggataccatggccatcctgccctgcgtcatcgcaacggtcgtccaccagatcatcgggcctatcgttgccagcatgttcgccgcaaagccgctgcctgaagaggccgagcctgtttccgaaaagaaaaaagcaaaggaggccgtcaccgcgtgaagcacttttccgaaatttccctgatcgcaacggtctcgtttatcggtgaactgctgcactacctcattcccctgcccgtgccgagcagcatctacgggcttttgctcatgctgctcctgctcgtcacacatatcgtaaggcttgaccacgtaaaagccacggccgattggctcatcggcctcatgcccgtcatgttcgtcggtcccactgtcggtctcattacgagctatgacagctacaaagacattctcatccccatcgttgtcatctccatcgcgactaccgtcctcaccatggcggtctccggcctgaccacacagggactcatccgtttacagaccaaagaagaaaaggaagagcgcgcagaagcgcttgaagcatgcgaaaaggaggaacaaaccgatgttaaatgatattgcgtcgaatacctcgtttttcggcatcttcatcaccggcgtcgcctatgtgctcgcctgcgccattcaaaagcgctttaagtcgtccattttgaacccgctgctcgtctcctgcgtgattctcatcatcttcatgctcgtcagcggcatcgattacaacgtctacctgtatggcaagccgaaagccgacggcacatacgacggcacgggtgccattttctttcagaacatgctcacccccaccaccgtttgccttgccatcccgttgtatgaaaagctcgtgtacctcaaaaagtacccggtcgccatcatcggcggcattttggccggcatgtttgcgtgcctcggcggcgtacttgttttgagcatggcattcgggcttgaccacacccagtacgtcacactgctgccgaagtccatcaccaccgccatcggcatgggtctttcggaagagctcggcggcatggtgtccgtcaccgtcgcgtccatcatcgtgacgggtctcttcggcaacgtcgcggcggccgccatcttcaagctgttccgcatcaagcacccggtcgccatcggcgtgtcctgcggcaccggtgcgcacgccatgggcacctcccgtgcgcgtgagttcggcgagattgaagaagccatgagcggtctctccatcgccgtgtgcggccttttaaccgtcgtcggcgcatccatatttgcaatgatccggttttaaaccagtcaattcaattacgagtaaatccgcaccggcccctgttaaacgctcagaccgtgcggattttttataagcaaagccgcgctcccggaaaactcccgagggcgcggttttgtctattcttttattttcttaccgattccataaacaccatgtacgcggttttataggtggagataaatgccggctcgccgaaattcatcgggaacggcttcgcttcgattttcttttccaaaatgaggtcgcacagcgtcagcatgtcgtcaatcttctcatagctgttcggcacatatttgtcctgcggatcctcgccgccctcctgccgcctgtggccgccgaggaacgcaagctccgtatagccgggcttctgcaatttttctttcagacgcagcaccgcagctttatactccgaaatcggtcgtgcaagcggcacctgcatccaaaggccgaatgcgtctccggtaaacatgcacttatgcgcgcggtcaatgaacacgacgctgcccggcgtgtgcccctccacctcggcaacttcaattttcacatcgccgccaaggtcgatgacatcgccgtctttgatgtcgataacgtccttttccgtaaaattcttgcccgtaccgtcgttcaaacgcggcagcagcggcacgtcttttttgctcatgtagtatttttcgaacacatcgccgctcaggagatggtcaatatgcgcgtgcgtcacggcaagctccacgggcagtgatgtcaggctctccgccattttcctcacgttgccgccgccaaggccggtatcgataagcagcgccttttctttgccctccacaaggtacatggagtcgttgttgtagtcctcgatatagaacacgcccgggcagatgaactcgatttcatagcggtcaaagcgcgttttgccgaacatccactccagcgcttctttgttttggtacgccgccgtccaagaaccgtgcgggtgcgtgtggtacacgttttccatttcgcccgcgggatactccgtgtagtgcgcgtcacggttgccggaggagcgcagcgaggacatcgccatacgcgagcccacacccaccgcgccgtgcggcgagtggtaatagcccgtcaccggcaccacggggtcgtcttcggcatggaacgcccacacaggcacatcttttgccgcgcgcagcttaaacggctccgcatagccgcaaatcggcatggccgccgcaatcttatgcgggtagcgcgtgagcagctcccacgtgcccgcgccgcccatggaaacacccgtcacgtacaagcggcagatgtccaccgggtactgcgccgccatctcgagcagcgattgcgccagtaaatcaacatacggcacccagcactggttttccgggcactgcggcgcgaggacaaaacacgggtgctccgcctgccacgcgtccgtcataaatgtgtccgcgcccggcgtgaaatcgagcaccaaatttaaatcgtccccgcgctcgcccgcaccatgcaaaaacagcaccagcgggtacgttttgccgggctccgtcttcggcgtgtacagcgcggcgtttaagtaccgcccgtcttttttcagttcttttacggaaatgttctttttttcaataccgttgatcatacaaaacaacctcctctaaagggttcattcctccagcagatacggcatcagcttttcgagcactactgcgtagccgtttgcgtacatgtgcataccctcaatggtgtattccgctttcaaattgcccttttcatccagcagacagtcgaacacattgatgtatgtgcagccgagctcctctgccattttttccacttcggcgttcacttctttcagctccgcattcgtgcgcgcgccgaactgtgcctttaccgcttccgggtctgcgccgggcagctcgcggttcacggggtaatagctcatcacgtaaattttcgtctcgggcagacgcgcctgaatttgcatcaaaatttttctgtactggctcatcaggcgctcgcgcttatattccgggcggctgatgtcatttgtgccgatgttgatgaacacctttttcggctcgaggtcaaaaatcgattcatccatgcgctccaaaagtccgtctgtcacgtcgccgccgatgccgcggttgtacacgcggatgcgcggctccacgttttgcagcatctcgttgatcgggaacagctcgcacagcgaggagcccgtaaatacgatctcgccctttttcacgaatttattgaggcacataaaattatgcactttcatttcccagtccgtcatataaagcacctgacttcattcgttttatttcacagtcattttagcacaaaatccgcacagatacaacctgtattctaaacattttcccctcttgacgtgaaaaaccgcagcatatataataatcacatagtaacacactaacacacgaaaatttgcactaaagcgctgtggtgtaagcacttcaacgcgcaaaagcagacgttgtaaaccgcttgcgcattaccgaaaagaggaatataaaaatgaaaattgccgcttatgaagtccgccgggacgaacagaaagactttgccttcatcgccgaaaagcgcggcgtggagctcaccgaaacagaggataacctgacgctcgaaaacatcgatacggtaaacggggccgagggcgtcacaatactcggtcgcacacgttttgaccgcgccctgctcaccgccgtccaggagcgcggcgtaaaatacatctccacgcgcaccatcggcgccgaccacatcgacctcaccgccgcaaaggagctcggcctcaaggtgtgcaactccaactacgcgccgaacggcgtggcagattacaccgtcatgctcatgcttcttagcctgcgcaagtataagcccgccctgtggcgcgcacaggtcaacgactactcccttgcgggtcttcagggccgcgagctgcgcaacctcaccgtcggcattctcggcaccggcaaaatcggcgcggcggtcatcaaaaatttgagcggcttcggctgccgcattttagcaagcgacatccgcgaaaacccgtcgctcaagggactttgcacctatgtggataacgaaacgctctacaaagcgtgcgacatcatctcgctgcacatgccgcttttagagagcacccgccactttgtgaacgccgagaccatcgccaaaatgaaggacggcgtcaccatcatcaactgcgcccgcggcgagctgatgaatattccggatatgatccgcggcattgaaacgcagaagatcggcgcgctcgcgctggacgttttcgataaagaagacggcatctaccacgagaaccgccgcgacgacatcctctcgaaccgcgatatggcctacctgcgccagttcccgaacgtcatcatgacgcagcacatggcgttttacaccgacgccgccgtgcagagtatggtgttctgcggcatagaaggtctgtgcgatttcgccaagaccggtcacaccgagaccgagcttgtataaatgtcaaatatgacgatgaaatcgagctcgtgctcaacctctaaaatcaaataatgcgtatagaaaaagagaaaacgtgtaccgagcttgccccggcgcacgctttctcttttctttttaccttttctggttatacgtgcggactaagcggtccacgtcattttcgctgtgaatttcgtactcgtgctgtgtgaggtattccttcacttcctcgggcaggtcgtcgaaatccttgtgccagtcgaaaagcgccgcgcccaaaacgtagttttccggcccccagtagccgttcatgccaaaaccgttcggaaacataaaatcacccccggcgcttagtatgcgccaaggggtgacttcaaattcatttccctacaatttcaaaaaatgccgtgcgtgtttacgtcagctcactgaccgatctgctcaaagaacttcgcgtggatggcggcaaccgccttgttcgcgtcttccttcttgatgagcacggaaattttaatctcgctcgtcgagatcatctgaatgttcacgttcgcctcaaacagcgcctcgaacatatcggaagcaacgcccgggtgagactccatgcccgcgccgacaatggaaacctttgccacgtcgtcgtcaaacacaacgctgctcgcgccgatggtctctacgtaagactgcatgagctcgatggttgcatccatcttgtccttttccacggtgaagctgatgtccttcgtgccgtttctgccgatggactgcaaaataatatcgacgtttacgttcttctgtgcaagcttagagaaaatgcggaacgcaaggcccggcttatccggcacgccgatgacagagattctggcgacgttttcgtcctttgcaacaccgctgatgagcattttttccacgttggtagcctccttaacgatcgttcccttagcccgtgtcaggctggaaagaacctctaattcaatatgatattttttagccatttcaaccgagcggttattcagcacctgcgcgcccagcgtcgcaagctccagcatctcgtcgtaggagatgacgtcgagcttcctcgccgccggaattttgcgcgggtctgccgtgtaaacgccgtccacatccgtatagatctggcacaggtcggcgtgcatggaagctgcaatggccaccgcgctcgtatcgctgccgccgcggcccagcgtcgtcatgtcgtcatacttgttgacgccctgaaagcccgttacaacaacgatgttgcgctttgaaagctccgccttaatacgttccggattcacacgcttaatgcgcgcgctgccgtaagccgtagaggtggaaaagcccgcctgccagccaagcaaagagaccaccgggtagcccaaatcttcaatcgtcatagcaagcagcgaagcagagatctgctcgcccgccgtcaaaagctggtccatttcgcgcttagacgggtttcggttgatctcttttgctttatcaatgaggtcgtccgttgtatcgccctgcgcagaaaccacaacgaccacgtcgttgccgttcttatatgtgccggtcacgatatcggcgacatttctcaaatgctcggcgtccttaacggaggaaccgccgaacttctgaacgatcaatgccatagaaacacttccctttccataacccctgtgggataattctcgttattcaatgatgatgcgcgcgccctgcgggtcggtatgcagaagctccacacgccagccgttgatgccgcggtcctgtaaatgtgaatcgcacgcgctcataaactcctccgcgccctctgtggggatcatggagatgatggtcgggcctgcgccgctcacatacgtgccgagcgagccaagctcgtagctcatgcggaacacctggtcgtaattttcgatgaggcccgagcgatacggctgatggatcctgtcctgcaccgccacgcgcaggttctgcagatcgccggagaacagcgatgccgtcattaaagcggagcgcgaaaggttaaacaccgtgtcttcgcgggaatactccgtcggcagcacgccgcgggctttctccgttttgagctcgaacggcgggatcatcaccgcaaagctgatcttgccggaaaccggcacggaaacgctgtacacgcgcttgccctccatggcagaagcgacaagaccgccggagattgccgggctcgtgttatccgggtgcccttcaatctgcgccgcaaggttaatgaggtcgctctgcgacatcggcgagccaagcatgcggttcgcgcccaaaataccggccacgatgcacgccgaagaactgccgaggccgcgcgccatcggaatgttgttttcctgaatgatatgcagacccggcagcgttttgccgcagatctggtacaaatgccgcgccgcccagtaaatgaggttcgtctcatcggtcggcactttgatcttgtccgtcgtcgtaatcttcagctcgtccgcttcttccatccacacgcggttgcacatggtcagcgcaatgccgagcgagtcaaaaccggagccaaggttggcactggttgccggaatatcgattcggatcataaagctttcccctttccgcttttatcaataatcggagatgcgaatgcgaccttcaacctttacgccgcgcgcttccagcgctgccagcttatcgctgagttccttctccgtaaggttttccaccgtaaagcccgcttcgccctgtaccggtcttttcgcgagcagcggcgtgatcttgccgaagacgtccgccgccgtgttcagcgccgtatcgctgtccttggcggaaacgcgcacgaatgcagacgtttccatgctgccgaaatcggccacgtagttcggcttcgcatcctcccagaagaggtacttgcgtgccttaaagtgcttcacacagtcgatgacgtccgccacaacggcactcgccgtgggcagcttgcccgcgcctttgccgtagaacaccacgtcgcccgtcgcgtcgccgcgcaccataatgccgttgaatacatcgtccacgctcgcaagctggctgccgcggtgcacgaacatcgggcaaaccataatatgcacctgcccgttttcgagcttcttcacagagccgatgagcttaatgacaccgccccaaacgtctgcaaaatcgacgtcctgcagcgtgatcttcgtaatgccctctgtgtaaacggaatccgggtacacgtgcgtgccgaacgccaaagacgccaaaatgcagatcttgcggcaggcgtccagaccctccacatcggcgctcgggttgcgctccgcgtaaccaagctgctgtgcaagcttcaaagcgtcttcaaagttcatctgctcgcggatcatcttcgtcaaaatgaagttcgtcgtgccgttcaaaataccggcaatctccgtcacatcgtttgcggcaaggcactggctgatggggcgaatgatcggaatgccgccgccgacgctcgcctcaaacaggaagttgaggttattcgcctgcgcgattgcaaggagctccgcgcccttttgtgccacaagctctttattggaggtcacaacgctcttgccgttttccagacacgccttcacaaagtcatacgccgggtgcagaccgcccatcacttccacgacgatttgcacctcggggtcatttaaaatgacgttgaaatccttcgtaaagcggtcgctgtacggcaggcccgggaactcctttaagtccagaatatacttaacatggatctcttccttcgcgcgcttcgcgatgctcgccgcgtgagaggtaagcacctccaaaacgccggagccgaccacgccgtggccgagaactgctatatttgccatttccattttcctttccacgcggatttaaccgacgatgctgtcaatcttaataacgccctgcacctcaaaaaggcgcttcaaaagctcatcaatctcaatgctcatattttcgcttcgcgccgagaccgaaacgaacgctttgccctttaccggaatattctggttaatggtcagaatgtttgcgttcgccttatagaataccgtcaaaaggttcacaagcacaccgggcttgtcgtttaacacgacctgtaccgtcataatggagcccgtttccttttttgtatacggaaaaacggcgtttttatacttataatatacactgcgggagatgcccgccatcttgaccgcctctgaggtgtttgaggcttcgccggtctccagaagctggttcacgcggatgaccttctggtatacctccggcagaacggattcgtcgatcaaaagaaacgatgtgttttccattgtccaccacctaagtacgtttgtattgcgtcgataaacagtgtagcacacttttcggcaaaattcaacccaaatttctttcctttccccctttttcttattttggtctatctcatacaaaaagcaacaggacccactcttaaaatgagtgagtcctgcataatacgcgttaaatttttatcgtggtccgcattctgcaaaccgctttacgccgccggtgtttccggctctgtcggcggttccggggtcggctctgtcggcggttccggggtaggctctaccggcggttctggggtaggctccggcgtcggttccggggtaggctccggcgtcggggccggcgttgcggtcggggccaaggtcggcgtggcctccgccgtcggcgatgccgtaggctccacgctcggggacgggctcggctccatgctcggctctatgctcggcgacggcgttgccgtggcgctcgtccttgcaatgtggtcggatcctccgtcacacgtcctcggaatgttgttctgcgaataccagccgtttgcaatgtgcacgcagttcgggccggggcgcaggccgctgtcgcggcagtaggaaagctgcaccacgttgtcgctcagcacatagctgccgctgtggaggaagtcgtagtagttcgcttccatccagtcgatgatgccgttatacatcttctttgcgctgttcgtgtcgtagatctcttccttatattcgtggccgttccagatgccgcacacgaaagcggttgtgccgcccatgtaccacacgtcgttgctgtcttcggtcgtaccggtcttgccgatctggtcaaggtcatcgcggcgcaccatatttgccgtggggtatgcatccgtgtccgtaccgttgatcggcaggtgcagcagcttattcataatggtcgccgtatcaaacgagattgcctgctcctcgctgtgattctgctggtaatcgtagatcacgttgccgtcgttatcctcaatgcggtacacggtgtacggggtgtaatacttgccgccgttgccgaagatctggtacgcgccggtcatctcgcgcacggaaataccgttcgtcaaaccgccgatggccacgccgccgacgttgtaggagtcttcctccgaaagcgatgtgatgtgcaggttctgcgtgaggaactggtagctcacaagcggcgacatctggttgatgagctgcgccaccggggcgttcagcgattccgtaatggcctgatccacattcaccgtaccggcgaacgtaccgtcaaagttgttcgggccctcgctgccgtcatcaaagtagttcggcagcggctcatccttcagcacggtgccgtacgtgatgagattgttctccaacgccggcgcatacacgctgatgggcttaatggaagaacccggctggttcgtggagtacgaaacgttgttctgcacgcggttgccggtctttttcaaaagctcgttgtcatcgtttgcctggttcgtgttcacgcagaggattctgccgtcatactccatcaggcacacgccgctccaaatgccgttgtcgctcgtaaactcctgccagttgtttttcaggtagttttcaaacgcctcctgcatcggcacatattcggcggagtagatcttgagaccgccgttataaatgaggtcgattgccatgtcgcggtcgaggtttgcatactgcataagcaggtcaacggtgtcgttgaacacctcttcctcgtaccagttccacacctcggtggaaacactctgggtatcggtctcctcttcttcgtcgtccatttcaaagtccacgccgcgcagcttcaggtttgcggattgctccatcgcctcgtcgtactccgcgcgcgtgatacgcccttggtcgtacatttcggagatgacaagctcgcggcgcttacggttcgcctctgggtggtagaacacgcacagcgcggccgggttttgcgtcgtcgcggcaatggtcgcacactccgcaatgttgcagtcccaaatgtccttgccgaagtagccctttgccgcggcctccacgccgtaatagccgttgccgtagttgacaaggttcaggtatgcttcgagaatttcatccttagtatacttcttttcaaggttcagcgccatgaagatttccttcaccttacgcatgacgctcacctgattttcgcccgtcaggttcttgataagctgctgcgtgatggtggagccgccggcggtatcgttgccggtcgccataccgtatacagcgcctaacgtgcgcttccagtctacgccgtggtgctcgtaaaagcgcttatcctcgattgagatcatcgcttccttcataatgtccggaatctgcgtgaaatcaacgcgcgtgcggatctcttcggcgttatagcgcaggcgctgcgtccattccgcattgtccacgctgtctatgtgcagggaatccgtcacatacataaagctcgattccttcagtttaaaggaagcaaggcttgcgttcatctccacatcgtggtagctccaaatgacggccgccacgctcaagcccacaaggcagccggtgatgatgcagatgcaaagcaccgtcttgaggagcttgccgaacatggtaagcaccgcatgtgccgtgccgccggccgcgcgggccgtttcgccgtctgtacggctcatgggtcttccgctcggctgcgccgtgttgtacttattgatgtcttttttcagcacgtttgacctcctgaaaaatcaaattgcgcggcaaaagcgcactttgtctgcataaattggcaaaccttggcgatactaaagccgcagggcaaatcctacttagaaaggatgtatagtcatgaaaatgcgtcttgagtcccttgtgcacgccgctcggcagcggtacggcgcatgggcggcgatctttatccttttcgccgcgctgtgcacgctttccgtgctttccgcacgcgatgcccgggaagctgcggcagaccccgcaaaagcagaaagcgactcttccgtttattatagcccaaacgatgcggcaagtcaagaaaccgaccgggagagcgccgcaaattcagcaaattttaaggaatacgaaacattcttcaccgtgcgcgcctataacggcagcgtggctgttttcaaagacggaaacgatgtgcccctttactgcattgaaacaccgctcagcagccttacggaggaagaccgccgcctgctcgcccgcggcattcgtgccgaaacgctctcggaagcctgcaagctgattgaagactatgaataaaaccgcaaaaagaggacgcccgctgccggacgcccccgatttgcctaaatgtcttttacttcatgctttcttcgtaggacttgatcatctttttgaccatctggccgccgacggagcctgcctggcgggaggtgaggtcgccgttatagccctgcttgaggttgacgccgacttcgtttgcggcttccatcttaaagcggttcatcgcgtcctgtgcttccggtaccatcgtcttattgctgctgttcatgtttcattctccttttttcggcggcgcttaacgctgcgccgcactgcttttttcgcgtttgttgttcttattgtgcatgatgaaaggagcattatgcgtgtcaatttttgcaagaatgcgcagttttttgcgccgcgcgggagagaatattctctcccctgtccttctcccgcttctcattttcgctctgaaaaatgaaaactgagatgccgcatgcagcttatgcggtacctctctatttcttattataaggattccgccgcaaatgtcaagtcaattcagaacatttgtttgtggttttggcggacatcttttcaaaaaaagaccgcgcagggcgttttcggcgctgcgcggttcttgaaatcctgtttgatcgatgtgtattgaaatagaaatcacttgccccagacttcctcggcgatctcctttacaagcgcgagctttgcccactgctgctcttccgtgagcttgttaccgacctcgcaggaagcaaagccgcactgcgggctgaggcagaggttctcgagcggcacatactttgcagcctcgtgaatgcgtgcgatgacggcgtctttatcctcaagttccgggcgcttggacgtaatcagtcccaaaacgacttttttgcccggtgtgacgaagcgcagcggctcaaaaccgccggaacgcgcgtcatcgaactccagataataggcatcgacattttcatgcgcaaacaggcgctctgcgaccggctcatagccgccccggctggcccaggaggaattgtagttgccgcggcaaatgtgggttgcaacggtgagatcatccggtttgccctcaagcgcgaggttgttgaccttcaaaagctgatccatgatgtcgcccatcttttccggctccacgccgaacacaaacggcgcggcggggtctacgcaaacgccccaagagcagtcatcaagctgcaggttgcggcagcctgcgtcgtagagctgcttgatgaacgcccgatagatctttgcaacgtcctcgagcagctcttcgcggttcgggtagattttattcgtcgtctccgcgttcatcgggaagatcatctgctcgtagaactgtgccggagacggaatggtctgctttgcgacggtgttttcgtcctcaagcgcctgcacaaaccggaagtgctccacaaaagggtgcgtacccgtcagctttaatttgcccgtaaggtacgtgtcatcgacgaccgcaaggacatcgtggaacgggatgccgcccctcggcgcggcgtggctgacgccctcaaaaccccacataaagtcgagataccatgtcttgcggcggaattcgccgtcggtaaggagcttatagcccgccgccttctgttttgcgacaaggtcgcgaacggcggtgtcttcggcttccttcagtgcttcgtaagtggttttgccggcttcataatcggcgcgaatcttcttcaaatcatccgggcgcagaaagctgccgacataatcgtaacggtacggaagtttgatatttttcatgttgatcacctgctgtttgagtttgtgcttacagtatacaggcaaattttcgccttgtaaaatacaagaaaaaagcggtttgccataggtttttactatggcaagccactttcggtttgcattattgcattgtgaacttctttaaagcgtcgatataatattgcgcaaacaagctcggctccacgttttcgcgcgtgagatagccgatttccatgtaatcgtcaagattgagcggcacggcgacgatatttttgccgtttagactctcgttgatgacgccgctgcaaatggtgtagccgttcagcccgatgagcagattgaacagcgttgcgcggtcacagacgtggatgtctttggcgcactcaagcgtgctctgaatttcctcggaaaaataaaacgcattgtggtcgccctgctcataggaaaggcgcgggtacggcgctaagtcctccagtgtgatgctttttcgctttgcaaggggattttctgcacccaaaaacacgtgcggctgcgctttgaacagcagatgaaatcccagcccgtgcgccttaatcgtcttttttaagaccgtctcgttgaacgggcttaaatacaaaacgccgacttcgctttttaataacgccacgtcctcgatgatctcatacgtctgcgtttcgcgcaggtgaaaatcgtacgtttcgccgccgtgctcctttaaaagcgccacgaaggcctccactgcgaacgaatagtgctgcgtggaaacgcaaaaccgtctgcgcacgggcgcgccgccgaaataccgctcacgcataaggtctaattggctgttcacctgccgcgcatagccgagaaattcttcgccctccggcgttaaggtcacgcccttgttcgtgcggcggaaaagcgtgacctgcaattcgttttcgagttccttaatcgacgcggtgaggctgggctgcgcgatgaaaagccgctttgccgccgcgctgatggtgcccgtttccgccacggcaagcacatattgaatttgcgtaagcgtcatgcgttctccccgctttcggttctgttttccgcttccagccgttttaatacgcccagaatatccttgtagcgcgcgatcaccttttggtagttttcgcgtcggtgcggaaaaaggcagttcgtgcagtccttgatgccgttttctttatattgaaacgcgccgccgcagttgcggcccaaagcgtaaagcgggcagtagcagaaaagacaattgaaattttccgggtccgcgcccttgtggcagggaaaatactcgcattctttatgcgcaaaatagctgtaattttgagacatattggctccttttaagcgtgcagggtacgtgtctacgtgaacgtgaagctcgggttatggattacgtttatcgcctcttatgctttgtcttccatggttttcaccatgtttttgatgcgctttgggtcaagacgcgggctgccgtaggggcgcagggccaaagccatcagcttcatggggttatcgtccgccgcaatgcggttagagcccattttgccgcacaccgtgcagcggtgaatgacagcccactccccgtttttgcgcacccacacgctgatgggctccatgacgccgtggcacgcggatgcgcggtcgccgggctcgttatccacatggacgctcgaaaggcagtacgggcaatggttgcggtggtcgctgcctgcgccctcgggcagaatttcgcgcccgcagaccttgcacgtaaacgggtctaagcacgcatgctttttgtagtagcctttttcgtattttctgcgcttattttcacggttcacggtcatatcctcctttgtcgcccgcgccgcccatcatgcgggtaagctcctctattttttccagtgggaacggcggcatggaaagcggccgcccggcaatggaaagcagcaaaacggggtcgtcctcgtccgaaacgggcgtagaggcaatctcgccgcaaaggctgcaccggcctaaaatctcccagctgtcatcgggcttcacccaaatggaaacgggctgtagcttgccgccgcattcgtagccctcgctgtccgcttcatggatggcggtaaggcagcgcgggcagtgggcatattctttttcggacacgttttccgccggctcaaagccgcaggcagggcagtgaaaacgcttgggggtatattccatagggtcgtttcctccttgtttttcgggaaaatatctataaaaacaagtataatatgaatcgccgcattcgtcaattccgtaaaaggaaaaacgccttgcattcccgataaaaagggacaataccgcacataaaactttcgacagtgcgcggtattgcccttgacagatttatcaaattggaatagatgagatcagaataaccgcttacgttcccatagaaatttcttctggcctcatagttttttaaaaattgtattgattttagcagggcgttgcaatatactttaataaatacaacttgtttttcgacaaataagacgtttttttgcgaggtgcactatgactacacaagctttgctgcagctttccgccgacattataacgcggtattacaataatgagatcgagccgtttctggcggcctgccacccggacgtgctgtggatcggcccggcaaatacacagattatccgcacgcgcgaaacgctcatcgagacgtttgccgaagagcaccacaacctgcgctttgagatgcacgaccttgtgaccgtgccgctcatgacgcccagcagcaaggtactggaggtgctgctgttttatgacgtagacaccatttggccggacaacagcatgcagcgtgtaaagcagcgcgttcagctttcgtgggtggtggaaggcgggcagccgttcatccgcgtgtgtcacgtttccaatgcactcgattacgatgaccgcgatgtgatttaccccgtgcactatggagaagatcgtgtgcgcgtggcagtgctttccggcgaggaccgcgcgccgcgcatcgttttaaagggcgcgaacaaggccatgctgtacctgcgccccgcgtatatcgattacttagaaacaagcggcatgcacacctatattcacacacaaaacgacatacgggaatcgaccgagcgactgacggcgatcgataagcgttatccgggactgtttctgcgctgccacgaaagctaccttgtgaaccccgaccgcgtgacggaaatcacccgctttcatttgacgcttataaacggcaccactttgcccatccccgaaaagaagtacacgaccgtgaaaaagcgactctcggagatgctggcgaaagagaaataaatttcctgaccgttcatgtggtttccctcacccctatgggctcccggtaacaccgggttatttttaacctctcgcacataggcaaagccttataaatcgtccatgtgttcgacctcctttaccgcgctttcatgcaaaatacagcaatttacgaatttttaaatttttttaaaaaaacacttgcttttttcgtttagctgttgtataataattgagcacttgagaagtgaatatatcgcggggtggagcagttcggtagctcgtcgggctcataacccgaaggtcgtaggttcaaatcctgcccccgcaaccaaagaaactcagttgttcttttgaacaactgagtttcttcttgtttgggcaagtttatgcctgcgacttttcatttatgcacccgcggctcataacccgaagggggctggtcgccggtggcgaccgtccagccccgaccgagccggcaggtgagaacgtaggagattatagtgaaatttgccttacggcaagtgaactgttcgctccgtgaacgttaaaaccccgattccgcacatagacggatcggggttttgttctgtacttataaatctctgtatttctttacgcggcggacttttttgtttttacggttcatcaggatggcaaggatagcatacgcggcagccaagaccagcaaaatggtggccgtaacgataaaccacgtggaggtgagcacctcctgcccctgctgcaaaacctgcacaatctcgctgcgctccacgctttccgcggcgacgagcgcaacggtggaaagctccgcgccgttataatagaacgtggcggtaccgacgtaatcgccctttttgatgggcgctttcacgctttcgggcagatcgagctttgtggtgatggcgccgctttccagactgctcggcagtgttgcggtgagattgccctgcgccagcacctgcaggcggtctttgccccacgcgtatttgaggcccacctcgccgagaagctcgccgtctgtgacgagcgttttgttttcgatattcaaaaatgcccagcggaacagcgtcgcggcatcgtacatttcgccgtgataatcgatatggttgccctcgctgtcgatatacgggctgcccatgcacacgacaaggtaactgtacccgtcatacgtagccgtggcggaaatgcagtagccggattcattcaaggagccggtctttacgccggtggcataggtgtaatactcatcgtcatagctcaaaagcatacggttcgtcgtggtgacggtgcgttcctcgcttgtcatgttcgtcggcggctgcgtgtaatacgtctgcgaggtgacgtccgtaaaatacggcattgtcagcgcatactccgtaatggtcgccatctcgcgcgcggtggtgtagtggttttcatcatgcaggccgtgcgggttcacaaaatgcgtgttcgtgcagccgagctccgcggccttcttgttcatcagctccacacagctcattttgccgtcaccgtcttcgtcgtactgcgggtcgtcggccgtgatattcaaagaatccacatattttgcaagcgtcagcgcggcatcattgccggatggcaccatcatcaggttcaaaagctcatagatggtaaagctttcgcccgtttgaatttccgccaaagacgagcccgtgccctcaagctcctcggcaacgctttccggcaccgtagtgcgcgtgttttgcaggtcgctgaccgtttccgccgtgacgatatacgtcatgatcttcgtcatggaagccatggggcggcgctcgtccggattatatgtatagacaacggtatcggtatcgaggctcaccatatagatagaagcactgttcgggtctgtgagcttatcgcacggaaagcccatttcgctgctttgggccacgaccgtgtttgtcgttgtgtcggtttccgaagtcgaggtatcggaagctgtggaattttcgctcgcagtgctttcggctgtatcggccaaaacgccggtcgtcaaaacggaaagcgacagcaaaacgcttgcgcatatcgataaaaatttatgttttctcactgtttatcctccaacggacatgatataatactgttaactattttattattatagcacggtttggcacccctgaaaaggtgctcgccggcaaattcagaaaaaagtcagattgaaaatttaaaaggagacgctatgcagcttttacatattgcagacctgcacttcggcaggcttttgtacggtcgcagtttaatggatgaccagcggcattttgtgcggcagtcgcttttgcctgcgctggatgaatataagcccgatgcgctgctcattgcgggcgatctgtacgaccggcagattgcctcggtcgacgcgattcatttattcgacgagctcatcgatgcgctgtgcgaacggagcatccccgccgtcatcatttccggcaaccacgacagcccggaccgcattgcggtgggcaaaagcctgcttgcgcggcacggcatccatatcatcacggagcttaaagacacgtttacgccggtcgagatcggcaacatacagattttcccgctgccgtactttgaaaacgcccagatgcgcgaaatgctgggcgatgaaacgctgcgcggtgcgggggcctgcatgcgcgcggcggtagaaaaaatggaaaaagcgtttgaccccgcgaaaaagcacgttttggtcgcgcactgctttgcggcgggggcctccacctccgattccgaaagccgcctttttgtcggcggcgcgggcgatgtgccgacggatgtcttctccccgtttgactatgcggcgctcgggcacctgcacgcggcgcaaagggcaggcgacacggcgcgctacgcgggctcaccgctcaaatattccgtagacgaagcgcaccagaaaaagagcatgacgctcgtcacgctcggcgacacggtggaaacaacgtgcatccccgtaacccctctgcacgacgtaaagcgcatagagggtacgtttgcggcgctgctcgaaaacgggcaggcggcgcccaatgaagactatgtggaaattctgctcaccgacgacgagccggttttccgcccggccgaccgactgcgcccctattacccgaatgtactcggcgtgcgcagcacgtggtttttaaagcagcacgcaggcacgcaggcggaagccgatctgcacagccgcagccgcgcggagcttttccgcggctttttaaaggaggtctgcggtgaggaagcgcagccggaggacgaagcgctgctggcggaaattctaaaggaactggagggcgatgcaacgtgagaccgatccgtttggagctttcggcgtttgggccgtatctggagcacaccgtcatcgattttgaaaagctgaacgaagcggggctgttcctcatcaccggacagacgggcggcggcaaaacgacgctgctcgacgccatgagcatcgcgctcttttataaatcgacgggcgggcggcgcacgtttcaagatatgcgctgccttgccgccgtggacagcgaccgcaccgaggtcgtctatcattttgcgctcggcgaagacgaatattgcttccgccgcgcgctgtaccgccgcaaaaagcgcggcagcgacgattttatcaccgaggaagaaaacgagtgcaagcgccgcacggcagacggctgggcgcttgccgcttcgggtgcggcgcgcaatgtgacaggctacgcggaaaacctgctttccctcaccgccgagcaattttcgcaggtcatcgtgctgccgcagggcaaattcatgcagcttctgcgcgcgaattctaccgaaaaagcagccattttgaaaacgcttttctcctgcgagctatgggaacgcatcgcgatgaaatttacggagcggcaaaaaaagctgtacgcaaagcgcgaaacgtgcgagacaaaactgaaatcgctgctcgaaaagcatggcgcggagaccgccgaggcgctcgccgtgcaaacggaagcgcttcgatcagaatgcgcacggaccgaaaaagcgctcgccgccgcgaaagaagcactgacgctcgcacaaaagcaatacacccgtgcactgcaatttgagcagtgccaaaaagctgagaccgatgccgaagcgcagctgaaaaccgccgaaacgcgggcagcttccgccaaagcgcagtatacgcgcgccgagcagaaccgcgcgggacttacaaagctgaccgccgaaaaggacacacttttaaaacgaagcgaacagctgcgtgcggagcaggaacgcagcctgcaaaaggagcagcttttaaaagaactgcgcgccgaggaggagcgcgagcgcgccgtgcagaagcaggcagaggacgaccgccaaaagctgccggaggtgctgcggcgcatcgcggtaggcgaagcattcaccgaaaaggccgatgccgcaaaagaccggctcgcgtcgctcttacagacgcagaccatcttaagcgaacagcttgtcgcgctgaaaacgcgcagtgacgccgccaaagtcgaagcgcagtgcaaaaaattgtggggagctgccgaagacgcggcgcgcaccgcgcgtctgaccgtcgtggggcaggataagctgctctcggcggcagaagccaaatggaaccaaaacagcgccgccgcgctcgccactgggctcacggacggcacgccctgtcccgtttgcggcgcggtgcaccaccccgtgctcgccgtgccgtgcgcaggcgagacgacaaaagaagaacttgatgcgctgcgcaacaagcttgaagacctgcggcaggagcaaagccgcgccgagcagacggccgccgccgcaaaagcgcggcacgaggtcgctttcgcacaattaaacgccgcaaacgatgccgcaaaaagcatcacagaaagcgaagaagtgctcacagcggcctatactgcggcgcaaacggcgctcaacgaagcacaaaagcttgcagcgcaggcgccggccgcacacaagaaacttgagacactcaaagcggaacgcgaagcgcttatgcaggtcgaaagccgccataacgctgcgcttgccgcctgccgcgccgctttagaagaaaaacgccgccaattaagcgccatggacgccgtacgcgatgcggcgcaaatcacattggagatgaccgaaatacaaaagcgcattcgcgtgctcgagcaggagaccgcagcgcttgaggaagcgttccacgccgcggaaaacgcgctttctgccgcaaacgaggccgtaaaagctgccgcacagcagatgttcgccgcaaaggaagcgaaaaatgccctcggcgcagcgccggaaaaggaccttccgcaaagcaaagcggagctggacgcaaaaagcaccgaaacgcagacgctttccgtgcagcttggacgctttggctccgacctgcgcaccattgcggaaagcgccgccgccgtgcagcaatacacggaggaagccgccgcgctcgacgtacagtacagccgcgcagcaaagcttgcggggtacgtgaccggccgcagcaacgccttgcgcgtgccgcttttgcagtacgtactcggcatgatgctcgacgagaccatccagagcgcaaaccgctttttctccgttttaagccgcgggcgctacgccttgcagcacaagcagggcaaaagcggcgcgggctacggcgggcttgacattgaggttttggacggcatgagcggcacgtgccgctccgtagagacactttcgggcggcgagcagtttttggcatccctttccctcgcgttcgggctttcggacgtcgtgcagagctactcgggcgcggtgcggcttgattccattttcatcgacgagggcttcggctcgctcgataccgacacgctcgataccgccatgcgtgcgctcgagagtatccgccaaagcgggcgcgtcgtcggtatcatctctcacgtttcggaactgcaaagccgcatcccgacgatgatccgcatttggaagaccgcttcgggctccgccgcagcaaaagtcatcgcggaagactgaaccgtttttgaacaaaatgaaaaagcagaaatgcaaattgcaaatccgcctttattatgctatactgaaagcaactaagcgcaggattttctgcgcggccatgcaatgctaaaagaaaggatcgcttccgggctccttcggaagcttcggtgaatgaatatggtaaagctttatgacggcggcgtttaccttgtgaacggcacagagatcgtgccggaagccgctgcacccgagacctatcaaaaagacacggcaaaacagggtaccattgcctattccattttaaaagcgcacaacaccgcagaggatatgcagaacctgcgcttaaaatttgatgcgctcgcctcgcacgacatcacgttcgtcggcatcattcagacggcgcgcgcctccggcatggagaagttccccatcccctacgtgctcacaaactgccacaacagcttgtgcgccgtgggcggcaccatcaacgaggacgaccacgtgttcggcctttccgccgcacgcaaatacggcggcatttatgtgccgccccacatggcggtcattcaccagtacatgcgcgaggccatggcgggctgcggcaaaatgattctcggctccgattcccacacgcgctacggtgcgctcggcaccatggccatcggcgaaggcggcggcgagctcgtcaagcagctgctcgaaaacacgtacgatgtcgcgtaccccggcgttgtggcggtgtacctcaccggcaagccgcgcccgggcgtgggcccgcaggacatcgcgcttgccatcatcggcgcggtgtttaaaaacggctacgtaaaaaacaaggtcatggagttcgtcggccccggcatcaagagcatgacgaccgattaccgcaacggcgtggacgtcatgacgaccgagaccacatgtctcacctccgtctggtgcacagacgacgacacgaaggcgtaccttgcaaagcacggccgcgcagacgattaccgcgagttaaagccggccgacgtgacatactacgacggcttggtttatgtagacctttccaccgtaaagccgatgatcgcgctgccattccacccgagcaacgcgtttgagattgacgagctgaacgcgaatctcggcgacatcctgcgcgaagtagaaaaggaagccgcgcgcttaacggaaggcaaggatatcgaattcagtctgacggataagatcacctcaaagggtttacaggtgcagcagggcatcattgcgggctgcgcgggcggcacatatacgaacgtcatggcggcagcgcacatcttaaagggcgcgcagtgcggtcagggcgaattcacactggacgtctacccgtcctcacagccggtgtttatggacctgctcgcaaagggcgccatttccgacctcatggcgacgggcgccattgtgaagaccgcattctgcggcccgtgcttcggcgcaggcgatacaccggcgaataacgcgctgagcatccgccacgccacacgcaacttcccgaaccgcgaaggctccaagccgggcgcaggccaactgagcgccgtcgcactcatggacgcacgttctatcgcggcaacggcggcaaacggcggcattttgacctccgccgaaaagtacgcggacgactatgaggtgccggaatacaactacgatgattcctcctaccgcgcccgcatttacaacggcttcggcaaggcagagccggaggataagctcatctacggcccgaacatcaaggattggccggagcaggaggcacttgcgcagaacattctgctgcgcgtctgctcgaagatcatggataaggtcacaacgaccgacgaattgatcccgtccggcgaaacgtcttcgtaccgctccaacccactggggcttgcagagttcacactctcccgccgcgaccccggttacgtgcagcgtgcaaaggatgtccgtgcactcgaaaaagcgagacttgcgggtgaagcacaaagcgatgaagctctgaaaaacgcactcgggaaagtgaaaaacatcctgcccgacgtcgatgaaaagacaatcgaaatcggcagtgtcatttactgcgtgaagcccggtgacggctctgcgcgcgagcaggcggcaagctgccagcgcgtcttgggcggtcttgcgaatatctgctccgagtacgccaccaagcgctaccgctccaacgtgatgaactggggcatgctgccgttccagatgaagaatgaacccgccttcgagatcggtgattatatcctcgtcccgaacgttttggacgccatggacggcgatatgcaaagcattaaagcgtatgtgctcggcgatgaagtaaaggagatcgagctttacattgccccgatgacggaagacgaaaagaagatcgtcaaagccggctgcctcatcaattttaaccgcaagaattaaagtaaagcataagaaaacggcgagtcctgttcaggatttcgccgtttttgtatgcatttttcgtcttcatagagaagcgacgcaaaaagtttttgatcgaccttttttcaaaaaggtcgcgggttcttagggcagcgccctaagtcgtcgtccgcagacgacgaaatctatttgccttccaaaaaatcaggacgggagagggaacagtccagtggactattccctcgtgggagacccaattagggggtctcccaaaggacggcaatacgccgcccttcttattataaccgctcggcttttctcgccttattgcttgctcttaaaaaacgcaataaaccggttccagtcctcgcggctgaaatagtgcagaccggggcggcggtgatagccgatgcggcccgcgtgcaggttaaaatcgtagtcttccgacgtttcttcatagggaaacgcctccttgtcccccgctgccgccgcatagcagctcaaaagctcggacgcggggtctgcccagtcgtcgcccgtcgcagacgccacgtatacatagcgcggcgcaatgctcgcgagcaggtagtgctggtcaaacggcagcgcgtccgttttgccgacatactgcccgaacgattcgcagaaccagaacggaaactgcctataaatatcgtcaagctgctcgccttttttgccgcggaacagcgccgcaccggcacagccggaatcgttcgagtagccaaacgcgaagcgggtatccagcgcggcagtgagcagtgccgttttgccaaggcgcgaatgcccgcacacaacggactttgcgcagtccaaccgctcgtcgtgctcggcgtaatccatgcagcgcatcgccgcccacgcccacagtgcgattttacccgcgtcatgcggcgcgcgtttgccgttctcatacagaacacccgcaaggccggaggtgaagtcgccgtcgtcgcgcgtcacatcctcatagccgaacgaaagcaccgcaaagccgttgtcgatgagctcctccgtcggcatgtagcggtccggcacatcgcttctgaagttgatgtggacaaaaaacgggtgcggcccctctgcggtcggcacagccaaatgcaccggaaacgcaaaatctttgccgtttaccacaacgcgaaacgtcagcttttccagcgtcgccttgcccgcgcagaaattatccgcaacgccgggctccgcttcccaaacgaacgattccggcgctttcggcaagcagccgtattcctcccgctgcaaaagctccagcatctccgcgcgcgattttaaactcggcacacccctctttttcagttcatccaaaaacatacaaacgccccctttatgcggttattgtagccgtccttttaggcgtttgtcaatcttcaaaaccaccaaaaaagctgccctctctttgtcagagaagacagcttcgttttgttttacaggcgttttatgcgctttcctctgcgtgctcaaactgactgttgtagaggttggcgtagaagccgttttttgcgagcaattcttcatgcgtgccctgctccacaatgtcgccgtccttcatgcagaggatgaggtcagcgttgcggattgtcgagaggcggtgcgcgatgatgaagctggtgcggccgcgcatcaggttatccattgcagtctggatggaaagctcggtgcgcgtatcgacggagcttgtcgcttcgtcaaggatcatgatgcggctgtcagacaaaatcgcacgggcgatggtgagcagctgcttttgtccctgcgagacattcgtcgcttcttcattgaggatcgtgttgtagccgtccggcagtgtgcgcacaaagtggtcaacctgcgccgcttttgccgcctgaatgacctcctcgtccgtcgcgtccaagcggccgtaacggatgttctccatgatggtgccgctgtaaagccacgtgtcctgcagaaccatgccgaattcttttctgaggtcgccgcgggcaaactccgtgatgtccttgccgtcaaggtaaattctgccggattttaaatcatggaagcgcatgagaagctttaccatagtcgttttgcctgcacccgtcgggccgacaatagcgatcttctggcccgctttcacatcggcggagaaatcgtggatgacagtctcatcggtgtcttcgtaaccgaagcaaacatggtcaaagcggatgtcgccgcggatattgctgttttccacggtgtatttcggtgttttttcgacgatctcaggctcatcaaggaaattgaaaatgcgctctgccgccgccatggtgcgctgtacctgacttgagatgcttgccatctgggtgatgggctgcgtgaaactgcgcagatactggatgaacgcctgaatgccgccgatggtcatgctgccgcctgccgccatagatgcgcccaaaatgcacaccacaacgtagccgagattgcccacaaagcccatgatcggctgcatcaggccggagaggaactccgacttccagcccgcgttatagagcttttcgttttcgcactcgaatttctccatggagcgcgcttcgccgttaaacgccttcacgacgacgtgcccgccgtacatttcctccacgtggccgttcaccgcgccgaggtattcctgctggccgacgaaatatttctgcgaggatttcacaatgcgtccgacaagcagtaacgaaatcggcacgatgcacagtgcgacaagcgtcaactgccagctgatggaaagcatcataataagcacgccgatgatggagcacacagacgtgataagctgcgtgatactctggttaagactctggctgagcgtatcaacatcgttcgtgatgcgggaaagcacgtcaccctgactcgttttgtgaaaatacgagacgggcaggcggtcgatcttctccataatggcacggcgcatgttgtacgagaccttcgccgaaacgccggacatcgtaaatccctgaatgtaggagaacagcgcgctcaacgcatacagccccacaaggaacagtaaaactttcgcgatatagccaaagtcaatgccctccgcagcgccggtgatgatgcgcatcaagccggccgtcagctcatcggtcgcttttgcgaggatcttcgggccgacgatcgtgaacacggtggaaagcgccgcgaaaatgacgacgatgagtattttaaacttaaacggagaaagatacgaaataagctttttaaagctgcctttgaagtccttggctttttcggtgggcatcatgcctctgccgggcccgtgcggacgcggtgcgtttcttttcggttcgctcatgccaattcctcctttgaaagctgactttccgcaatctcgcggtattccgggcacgttttcaaaagctctttgtgcgtgcccttgccgacgattttgccttcatccagcactataatctgctcggcgttcatgatggtggaaacgcgctgcgcgacgatgagcacgacagcgttttccgtgtatttcgtcagtgcacggcgcagctttgcatccgttttgaaatcgagcgcggagaagctatcatcgaaaatatacaccggcgcttttttcacgagcgcacgggcaatggcaaggcgctgcttctggccgccggaaacgttgctgccgccctgcgcgatggagctttccacgccgttcggcaattcgctgacaaattccgtagcctgtgcgcaatcgagcgctgccagcacctcgttcacatcggcgtcttccttgccgtacttgatgttggaatcgattgtgccggagaacagcatggccttctgcggcacgtagccgatgttatcgcgcagttccttttgcgaaagcgtgcggatatccttgccgttcaggtaaactgcgccgtcggtgacatcgtaaaaacgcgggatgaggttgatgagcgtcgattttcccgcacccgtcgcgccgataaacgccgtcgtttggccgggcttggcggtaaacgaaatgtggctcaaggtatcttcctcggcgttgccgtagcggaaggaaacgtcgtcaaaacgcagctcaccgctttcattaccgagtgtaaccgggttttccggctccttaatggaaagctccgtcgtcagcacctcctgcacacggtctgcggaaaccatggcgcgcggcaccataatgaagatcatcgaaatcatcaggaacgacatgatgatctgcatcgtgtactggatatacgccatcatgtcgcctacctgcatggtggattccgcaatggcgtgcccacccacccacatgatgagcagcgtgacaagattcatgatgagcatcatgatcggcattgtaatgctcatcacgcgctgggtaaagcggtttgtgcgggtgaggtcttcattcgccttatcaaagcgcgcctcctcgaatttctcattcgtaaacgcgcgtaccacgagcatgccgctcaaattctcgcggctgacgaggtttaatctgtccgtcaaacgctgcaagctcttgaatttcggcattgcaacgtttaaaagtacgatgacaagccccagcaaaacgatgaccgcgagcgcgatgatccagcttagcgaaacgcttttttgcagcgcgaaaataatgccgcccacgcccatgatcggcgcgtagcacatcaaacgcagacccatggaaataagcatctgcacctgcgtcacgtcgttcgtcgtgcgcgtgatgagcgatgcggtggaaaatttatcgaactccgtgttggaaaagctttccaccttgcggaacacatcgctgcgcatctgctttgccacgccggacgaaatacgcgacgcgaagaagccgacaagcaccgccgccagcacaccgagcagcgcaatgccgagcatctcaaggccctttatcacaatgtagcgcacctgttttgcgtccaaatcgacgccgagttccttatagaacagctttgtaaacgtcgcgcccacctgcgagccgatcatcgactgcgcgttttcggcagaatcgatcgcttcgctgaacgtctctttcggcatctgctgtaacatggggataacagcataaagctgacgcatatccatgtcctgcacgccgctttcggtgtccaccgcctggccggtctgcgcgccgtaatccttcagaaatgtcatgaacgcatacgccgctttaccgtaggcatcgcccaccgcctgcacgtctgcatcttcgcttaaagcgaccgcatccatgtccttgatattctcgtaggttttcgcaagcttcgtctcttcatcgctgccgtgctccacgggcgtgtaggcgtttttgaacgtccccgcctccgcgtcgttcataaacagcgccaataagtcaacggcctgttggttcaaaaccgcaggtgcagcctcatccacgccgccaagctgaatgccggtgttcacaatgtcgctcatcaggttcggtaatgtcaagtcacacatcgcctgcccgaaaagcagcagaatgcacgccagcaccagcgccgcaaacggctttaggtacgttttcagcaatttcattcggttttctcctttctcatctccgggtatctgcctgtctcggtaaagttttcaaggtttcgccgtatttgctccatgacgcggtggaagacctgcatgtcttccgggctgacaccggcgcacattttttcataatattcatgcttcagctctctgcaccgcttaacagccggctcggccttcggcaacaaaaccaaatgtaccatgcgacggtcgctttggtccggttttgtttcaatccatccgccgcgcacaaggtggtctaccgccttactcatcaacgagcgcgaaacacccatgcgccgcgcaatgcgcccggccgtatcgacctttgttgtggaaaggcacatgatcacaccggattccaccgcggaaaggtcttcatccgccagcaccttgcgcagctccgtatggatgatgcgcgcgatctgcgttaagtgctccgcaagcccgtcgtgaaacggcacggccgtacacgcttgctcgtctcgcttcattcctcgcacctcctgttgcttactgctgaacatcgccaaaagttcttaacgatgtccatttccaaaaaacagtttaaaactgaattgttcatttttgaactgttaaggaatgaacatattatagaccgacaaaaacaaaaaagcaatgactattttgtgaataaagctgccaaattatatttcagaaaaccatatagccgaaaagaaaaaagacccgcaaacacagcgaactgcatttgcggatcttgaatcagacaattataaggtgaagctaaattacttcagctcgacctcagcgccagcctcggtgagcttcgtcttaagagcctcagcgtcgtccttggaaacgccttccttaatggtcttcggagcctcgtcaaccatagccttagcttccttcaggcccaggccggtagcttccttaacaaccttgataacgttgatcttgtttgcgccagcagacttcagaacaacgtcgaactcggtcttctcttcagcagccggagcagcagcgccagcgccagcgaccataaccggagcagcagcggaaacgccgaactcctcttcgatagccttgaccagctcgttgagctcgagaacggtcatggacttgatttcttcaacaaactttgcgatatcagccattgtaatatcctcctaaaatttaaatttgaaaattatcctgcaaacttatgcagtttcctgagcctttgcaacttcactaagtgcaatagcaagaccacgcgggccggatacgagaacgctaagcagcatctgaacaagaccttccttgctcgggagatctgcgattgcagcgatctctgccggagacatgaccttaccgtccatgtagccggacttaatcacgaacttaccgtcggaatcctttgcaaacttgttcaggattcttgccggagcgatctgatcctcgtgggaaacagccagagcggttgtgccttcgagaacctcggacataccctcgatctcggtgccttcgatagcacgcttgagaagagtattcttaacgacagtgtactcaacgccggcttcacgcagttccttacggagctttgtgtcggcctctgcagtgatacccttgtagtctacgacaacaccggatacgctgttagcgaccttatccttcagctgagcaacaattgcctgctttgtttccaaaacgcttttactgggcaaaatattcacctcgcctttcagttatgatttggaaaagcgccaaaatgaacgattttcctcggtgcgaaaactaaaaatgccttcccacttaccgcaggaaggcataaaaagtacaaagtaacttttccgctccctcggcaggcggtaaaacctttcagcccggaaaaccggtgcacctgctgtcttaggtaaacagctttgtaattatagcatggcagaagaactctgtcaagccttaaatttaagattcagacgaatcttagccaaccttgttcgggttgatcttcacgcccgggcccatcgttgcagcaacaacgcaggaacggatgtactggccctttgcagcagccggctttgccttgttgatggcttccagcagcgtgttgaagttttccgtcagcttctctgtgccaaaggaaatcttgccgatcgggcagtggatgatgttggtcttgtcaagacgatactcgatcttaccggccttcgcttcggtgattgcacgtgcaatgtccggagcaacggtgccggccttcgggttcggcatgaggccgcgcgggccaaggatcttaccgagacggccaaccatacccatcatatccggggtcgtgatgaggacgtcaaaatccatccagccttcggactggatcttctggatcatatcattgccgccgacgaattcagcaccggctgcacgagcctcgtcttccttctccggcttgcagattgcgagcacgcggacggtcttgcccgtgccgtgcggcaggacgatagcaccgcggacctgctggtctgcatgacggccgtcaacgcccagctttacgtggacttcaacggtttcgtcgaactttgctgtaccagtcttgacacagaggtcaagcgcttcctgcgtatcataaaggcggctgcgctcgatgagctttgcgccatcgacatactttttaccgtgtttcattcatgttcctcctaaagtggtagatatcggattctcagagagtttcctcccacccgggtaaaatcaaatcaatcgactacttcgatgcccatgctgcgtgcagtaccggcgatcatgctcatagcactctcgatggatgcagcgttgagatcaggcattttctgctcggcgatcttctttacctgctcgcgggtaatctttgcgacctttgtcttgttcggtgtgcccgaagctgtttcgatgccgcaagccttcttaataagaactgctgcaggcggcgtctttgttacaaaggtaaaggaacggtctgcgtatactgtgatgacgaccgggataataagaccagcgtcgcccttggtgcgctcgttaaattcctttgtaaatgccatgatgttaacaccgtgctgaccgagagccggaccaaccggtggtgccggggtagctttaccggcaggtatctggagcttaataaagcccgtaaccttctgagccatttgtttgcacctccaaaattcgtggttgatggcggaacgtccgtgaaaattcaggcgttcctcccacagggggacgtatccccctcaataaaaagcggattaccgcaatttaccgtgtgttattccaccggctccgcctggtcaagttccaggtcaaccggggtttcacgtccgaacatcgaaaccatgacgcgaatgtggttcttgtccacatcaatctcttccactgttccgataaagccctcaagcgggccgtcggtaatctggacgctgtcaccgacattgtaggagacttcgacattcctcgtctccacaccgagtcgctccacttcttcatccgtgagcggaatcggcttggaagacgggccgacgaagcccgtgcagccgcggatattgcgaaccgcgtaccacgattcatccgtgaggatcatctttacaatgacgtaacccggaaaaatcttgcgttccacttccttggtcttgccgtttgcggcaacttctgtgaccttttcggtgggtacgcgaatctcaaaaatcaaattctgtaaagagtggttttccaccgtcttctccagatttgacgcaaccttgttctcatacccggaataggtatgaaccacataccattttgcttcgtccgacatttcgattcctccgcttctcaaataaacgcgtgatcattcacgctgcttatttcgccacttgcatgacgagacccagcaaattcatgaagacggtatccagcaggaaaatgaagagaccaagcaggatgatcgtcgcaagaacgacacccacatttttgaaaacgttcttcggcgtaggccaaacgatctttttgatctcgcccttgcagtcgcggaaaaactttcccgctttcttcgtaaagcgaacaaagccgttttctttttttgctttttcggccataacttcgttcctcgctttacttcgtctctctgtggagcgtgtgcttcttgcagaatctgcagtacttgttcatctcaagtctgtcgggatcattcttcttgttcttctttgtgttgtagttgcgctgtttgcattcagtgcaagctaaaacgacctttactctcatgacggcacctcccgttttacggaaaaaatttgggatgttctcccagcctccctcaaaatttgggcgcaaaaaaatagcccccaacttgaggtatacctataatagcataggatatacgccgctgtcaagagctattttgagattttatgcggtttttcagttgctcaggcgtgcctccacctttttgcccttcttcttttccttttcgggcttgatgttcttgccgatgagttttctggagtgcttatacaccttctgcaggtcgcagccgtccgtaaagttcgcgatgatattgttgatggccgcctcgttcttaatattattcagaacgccgaactgaatgactgcacgggtatccatatcacccgcggcgtacatgtcgcagaaaatggtgcacatgcgcttcatgggctcgctgtccttatagtttttcgcaagattctcgcacttcggcgcaaccttctcagcagcaaacagtgccgtgcgcacctgaccgtacacgatgcgttcctcgttcatttcgtcgcgcagctccgggaacaccggcaccaagcggttgagaaagaactgcggatccgcgttgttctcttcgtccttcttgcggcgcttcttcgcggtctgtacgagctcgcggcgcttagagccctgcacgagctcaagaaagtcattcgcgatgctctccgcgtcctgcatggtgttttcaccttcatcgaacagccacatggaaagctgacgccagtcgcccggctccttcggggtcttcatcgtcgcgctgcgcagcacaaagcgccgctgcttcgtctcatagaaaaggccgtaggccacttcgcccgtcgtaaacatcacgccgcggccgttgtcggtctccagcggcacagcttcgccaaagccctgctcatttaacgctgcctgcaatttttcctgtatcagttcaaaagctttctgctccaagttatgatcactccgttacattagtaatttagagtataacacagttttcgcgcattgtctatgaaaaatccatgaattcccggaaacttattttttatcggaacataaatccattgccatcgtgcattttatatgctaatataggctcgtattgaaaatatgcaggctcggcccgcaacagaaatgaaggaaatcgattatgacagaacacggcggcgctgccgctttaaaacagaataacctcgccgctctgcgcagcgcgctgtaccacacggatttcgccacaaaaaaagagcttgccgagcaatgcaggttaagccttgcggcctgtacggcgctcctcggcgagatgattgacgacgggcaggtgctggagctcgcctttgccgcatcgaacggcggccgtcccgcgcgccgcttttccatcaacccaaactacgcgcacattttgtgcctgtataccgctaataacgacgtggaaaggagcggcatcgccctgcgcgtgtgcgatttaaagggaaacagcttgcaggaaaaattctgcccgctcaacgacattctgccggaggatctcacgctgttcatcacacagatggtgcaggcagatccgctcattcgcgcagtcggcatcggcatttccggcgtcaccgaccgcgaaggcgccattgaatcgcttgcgttcccggcgttaaacggattcaacccgaaaaaggtactcgaagaacagctcggcatcacggtcatcacggaaaacgacatgcacttcacgtcctacggcttttacgtgcgcaacccctgcgaccacccgtactccctttccgttctctactggccgagccaccgcagcgccggtgcgggcaccgtggtggacggacacatcatcgtcggcagtacaaaatatgcgggcgagctcatcagtctgccgctcatcaactccaccgctacaaaagtcgagaccgtctcgcgcatgattcacggcgagaatatcgtgccgctgatgcagaccgccgccgtgtgcaccatcgcgcttttgaacccggacatcctcttcctcaccggctctgccaccttgaacgtgcgcgaaaaagatatcatcgattactgcaagcagagcatcccggaaaaccacatgcccgttttccgtatgcaggcggacatccacgaggaatacatgaccggtatcttctctctgacgcgtcaggctttgaaattcaaacattgagcctctttttgaaatgtacagacaacgctctttaaaatttcctaaatctcataaaaacttttctgctgcttttttgcaaaatgtttaaaaaggggctttacaaacggaagcgaatgtgataagataccttttgtcagaaagtgacgaaagtgtccgatccaaaagggatgaaggacaacggggagtttatacgggcgcgacacgccggggatttgcccacaccgcacccataaatgaagaagacaggacaaagcgttttcagatacgctttgtcctgtttttcgttttacaaaattatttctttacaatctgcgccgcttcgcgtgccagcgcctcaatggcgtcaaaatctccggcgtccaggagcccccccggcaccatccaactgccgccgcagcacagcacgttcggcagcgcaaggtactgcgccgcgttctgcgcgcggataccgccggtgggcatgaatttcatgttgccgtaaggaccgccgagggccttcagcattttcacgccgcccacaacctccgccgggaacagcttcacaaaatcgagccccatgcgcatgcaggcttccacctccgtcggtgtcgcgcagccggggatgaccggcacacggtgcgcaatgcaccaacgcacgacctccgggttcgtgcccggactgataatcgcggaagcgcccgccttcacggcgcgctctgcggtctttacgttcaaaaccgtaccggcgcacacgcacacgtccggcacctctatcttaatacggcgaatggcttcctccgccgcgtctgtgcggaatgtcacctccgccgcgggcagcccgccttttttcaacgccagcgccagcggaactgctttttccgcatcgttgatctgaataacagggatgatcccgatcgattttaacgtttcccgaaaattcatagaacaccctcccggtgattttcttcaatttattgtatcatgcgccgcaaaactttgcaatatatccccatttcaaaaaaattccgttttatttcaaattcgcgcttgacaaatgaaataacattcgatattttatcctcatcagctgaaccacacccgggaggaaactatggcaagaacaccgcgcatcacggcggaaatgctgcttgaggcaggcgccgccatcacactggaaaaaggcgcagatgcactcaatgtccgcagtgtcgccgctaaactcaattgctccgtgcagcccgttttccgcaacttcggcagcatggaaacattccgccgcgccgtcatcgaatatttagacggcacgtatcaatccttcgtcgcgcagtacctcgataaatcggactacctgttcacgatcagccttgcgcacattctgctcgcccgcgacaggcgcaatctgttcggtgtcctgtttttatcgaacgaatacggcagccgcaccgtgccgcagatcatctcgagcccgtggaaccgcgaggccatcgactgcacggcggtgcagtacgggctcaccgtaaaggaagccgaagccgtttatcgcgacgtgcgattttatacattcggcatcgccgaagcgctgtacgcgggttcacttattgcggaggaaaatgaactgcggcagctgctgcgcggcgccattcgcaaattctgcgttcaataacgcggtgttctcatttaaagaatttggagaaaaaacatggacatcaacgcacaaaacaaggaaaaatatttggaagacttaaaaaattggctccgcgagctcgaaagcgccccgcttgaagaaatgggcgcgtttttccgcaagcgcctgccggaatacgaagcgcgcatgacaaaattctggggcgaagactacaagcagttcgcacgcgccgtgccgcaaagcgccaagcgcattttagacctcggctgcggcacgggattggagctcgacgcgctctacaatttgcgcacggatatttccgtcaccggcattgacctttcgcccgatatgctcgacgccctcatgaaaaagcatggggataagaacctcacgctgctgtgcggcagctactttgccgtgccgttccccggtgcgttcgacgccgtcatctcgtttgaatcgctgcaccactttctgccggagaaaaagagtcggctcttcaaacgcatctatgactgtctcacgcccggcggcatgtttgtaaacggcgattacttcgcctgctgtgacgaagaagaaaacctgctgcgcgaaacgtggagccgcaagcgccgcgaagaaaacattcccgacgacacattcgtccacttcgacattccgctcacaaaagaacacgaagctgcactgttaaaagaagtcggcttcaccgtcacggtggaaaacggtaacgattgttcgattataaaagcggtgaaataacgcacagcgaagcggcgaataaagtttttgatccaacttttttcaaaaagttggcggggtctcggggcaaagccctgaggcgcgctccgcaggaaacccagttgcatgggtttcctgataggcggtcaaaagaccggcctatttaaagcgccgcacccacgttttcctgcgtgagtgcggcgttgctattcgttttacttttccgcgctcggtgcactgacgctgaaaatcgcacctctaacgccgtccagcttcacggttgtgccggagcgcagcaggtcggtcgcgtgcgccgcgccgacgatggccggtttatccagcgccatggcggcgatggctgcgtgagagttcacaccgtccatttccgtcacaatacccgaagcttgacggatcagcggcatcgttgcgtttgtggtcttcggcagcaccagaatatcgcccctgcggaacttctgcagcgcttcctcctccgttttgcacacgcacagcgggccgcaggtactcagctcgttcacaacggtgccggagacaagcacgtcgcccacaaggtgtaccttcaacatgttcgtcgtgccggaaatgcccagcgggatacccgccgtgataacggcaatgtcgcccgcctgcacaagcccgtgctcctccgcaactgcaacaatgtgctcaaacagctcgtcggtgctggtcttttcctccagcatcacggggattacgccccaggaaaggcccatctggttcagtaccttgcggtcggtcgtgccgctgatgattgggcacgccgggcggaatttcgaaatcatgcgcgccgtaaagcctgttttcgatacggtcatgatggccaccgcaccgaggtcgtgcgccgtcgtgcacgttgcgtgcgaaatggcagaggtcacgtccttttgcaccggcacatcccactgctccagctgacgcacgtagtcgatgtcgttttcggtgcgctccgcaatgcggaccatcgtgcgcacggcctccaccgggtacgcgcctgcggccgtctcgccgctcagcataatggcgctcgtgccgtcgtagatcgcgttcgccacgtcggtcgcctccgcacgcgtcgggcgcggattcttgatcatggagtcgagcatctgcgtcgccgtaatgacctgcttgccggcgacatacgctttgtgaatgagctgcttttgcagcaccgggatttcctccatcgggatctcgacgccaaggtcgccgcgcgccaccataatgccgtccgaaacgcggatgatgtcgtcgatgttctccacgccgtccgtgttctcaatcttcgcgatgatgcgaatgtcgcggcagttgtttttttcaagctcgttgcggatcatcacaatatcctctgccgagcgcgtgaacgaggcggcgataaactcaaaatcttccttcacgcagaattcaagatctgcgcggtctttttcgctgatatacggcatggaaagcgtcacgcccggcacattgatgcccttataagacgtgatggggccgtcattcaaaaggcggcactcaatgtccgtgtctgtcaccttttccacgatcatttcaatgaggccgtcgtcgatgaggatatgcgagccgcggtgtacgtccttcggcaggtccttaaacgtgatagagcagccttccgcgtcgccggggcgctcgttcgtcgtcagtgtgtacttctgcccgtgggtcagcatcaccttttcggcaaacttccccgtgcggatctccgggcccttcgtgtcgagcagaatggcgaccggcacgtcaagctcttttcgcagctttttcaccatatcggcgcggcgcttttgctcctcatgcgtgccgtgcgacatattcaggcgcgccacgttcatgccgctcaaaatcagctcgcgcagcacagcctcgtcatcggtagaaggacccagcgtacatacgatcttggtttttctcatctatatcgacccctttcattttcgcagactccatggcctgcacatcagtgtgggctattttttcttattatagctgaaaaaagaaagggaagtcaatatgacggctaataattaaaaaagtaacaggctacttgttgaaaatgactcgctttttcacaccggaagtcatatttttcacttttgccgtgcgagaaagtatccttttctgcatttcgcagatcggcagaggcagcaaagcaaggattgccacgatgccccactgtgtcaaggtcagcggtacggagccaaacagcgccgccgcttgcggaaacacgaccacgcccgccatcaatgccgagcaaatcaaaaacgatacgttcagcccccggtttttaaacatgccgcgtcccaaaaccggccccgtactgcgcatattatagctgtgcacgagctgcgaaaggcttaggaccgcaaacgccatcgtgcgccccacggcgggctgcatgggatcggcgtcaaaaaacacgcgtcccaccgtgaacgccaaaagcgccagcgcgccgatcatcataccctccgccgccattgcaaaaccgagcccgtttgaaaacgcactgctgtcccgcgcggtaggtgggcggcgcatcacgtcgccctgcggcgggtcactgcccagtgccagcgcaggcaaagagtccgtcacaaggttcacccataataattgcgccggcaaaagcggcgtcggcgtgcgcagcaaaaacgacacaagcaccaccaagatctcgccgatgttgcacgacatcaaaaaatggatggtcttgcggatgttgccgtacaccgtccgcccctcccgcacggcggaaacaatcgtcgcaaagttgtcgtccgtcaataccatgtcggcggcgtttttcgcgacctccgtgccgtttttgcccatcgcgcagccgatgtccgccgctttcagggcaggcgcgtcgttcacaccgtcgcccgtcatggccgtgacgagcttcagcctgcgaaacgccttgataatgcgcattttgtgcgccggagagacccgcgcgtacacggaacacgtctgcaccgtctgcaaaagcgcgtcgtccgaaaggctttccagctccgcacccgtcatcacagctttattttcaatgccgagccgcccggcaatggctgaggccgtagcgggttggtcgccggtgatcatcacggggcgaatgcccgcacgcttgcactcggagaccgcctccgccgcctccgggcgcgggggatcctccagcccgataagtcccaaaaagcacagcccgttttccgccgcatcgtccgtctcggggcaagcttccgtgcgcttttccgctgccgccagaacacgcagcgcgtcgtttgccatgtcgcggttttttgcgctcagtgccgcccgcatctcgggtgttaacgtaacgttcttcccgtttaaaagcacatacgtgcagcgcggtaaaatcgcctccggcgcgccctttgtgatgaccctgtatccgccctccgttcgcagtacgactgtcatacggcggcgttctgccgtaaacggcacctcagccgctttcactcgctgcttttgcagacgctcccagtccgatatcgccgcgacaatcgccgtttcggtcgggtcaccgagcagcttctcgccgctgccctccacgctcgtgcacagcgccgccgcagataacaaagcgtctttatcctgtccgttcagctcgcccgccgcacctgcgcagcgcactaccgtcattttgttctgcgtcagcgtgccggttttgtcggagcaaatgacctcgcagctgccaagcgtctccacggcaggcaaatgccgaatgatggctcgctttgccgccatgcgccgcacgccgagcgccaagacgatcgtcaccacggcaggcaggccctcgggtatcgccgccaccgcaaggctgatggagatcatgaacatttcaagcggttctgccttttggataagcccgatcaaaaaaatcaccgtacatatcccaagtaccaaaagcccgatgagcttgcccgtgcgccgcagccgcagctttaacggcgtgtcgggtgtttcttcgtctccaagcatcgccgcaatgcgacccatttcggtttgcatgcccgttgcggtcacaatgcccgcgccctgcccggcagagatgcccgtgccggaaaacagcatgtttttgcgctccgccgcgccgcacgtttcgtcacataccgcattcgcactcttgccgctcggcacggattcccccgtcagcgcgctttcctcggcctgcaaatgcatgctctccaaaagccgcaggtcggcgggcactacgtctcccgcgcggatatatacgacgtcccccggcacgagtgcttcggcggaaatgaccgcgcgtttgccgtcccgcagcacatcggcgtgcggcgcagaaagcgtgcgcaacgcttccaacgcccgttctgccttcgcctcctgcaccgtgccgacgaacgcgtttgcaatgacgatgcccaaaatcagcagcgggtcggccagattcgcttccccctgcatgcacgagacggcaaacgacactgccgacgcgatgagcagaataagcaccataaaatcgccgaactgcagcataaatttctttgcgaagctcgttttcttccccttttgcagccgattctcaccgtaaacgccgagccgctttttcgcttcggatccgctcagtccgcgccccgcgtcgctttgaagggttttcacagccgcctccgccgtcatggcatagaattttgcttccgctatgggttttgacattttcctgcccccttttccggtaattctatgcgcgggcgcgtccgtttagaattttgaaagaattctttcattgaaatccactggcatttttagaaaaattgcagtatactataactcaatcaaagcattggaggtttactaagatgagttttcccggcatcccgtcgcttgacgccgccgtcatggcctttatacagacgcactttcataacaccgtgaccgacacggtcttccccatcatcacatcgctcggcgaagcgggcattgggtggatcgtcctttcgctcgttttgctctgctttaaaaaaacgcgccgcaccggtggtttggtgcttatcgccatgacggtcacgctgcttttcggcgagctgacgctgaaaaacatcatctgccgcctacgcccgtgcaacgtgttcacggattttccgatgctcatcgcgcgccccacgtcctattcgttcccctcgggccacacatcgtcaagctttgccgcagcgcttattttgacgctccgccacaaaaaagtcggctggctcgcgtacattccggcagtgctcatcgcgttctcccgcatttttctttttgtccactaccctaccgatgtcctcgccggcatcctcctcggcaccctcgccgccctcctcacctactttgccgccaaggcgattcaaaaacgacaggcagagaagcgcacggcacaaatttgaaccgtttatttcgaccgataaaagcagcgcgcaggtttcacagcctacgcgctttttctatctctgttcagttctttcttgtcaattcttccaacactttccgtacattatgcgcggcgtcttcctgaatctcaatgacctttgcaccggcgtgctttgctacgtcccgcaggtcgcacgcgatggcggtgtggtacgaacagccgatgacaaggaacacgtcgccgggctttaattcagccgtcctttcgtatgctttcgcatagttcggcgcggggtcaccgtacagcacgggcttattatgaagcgcccacgccttgtccatttcgtcgtcctccggcaggccgccgtgcagttccagtgcgtcgctgcccgcttttttatgcagcccgtcaatgttcatcgtgatgaccggcaccttgtattccgccagtgcaaaatgcgcgtcgttcggctccgcgccgttcatattcgctttcaattcgcgaatgacctcgttatacgcctcgtggtgatgctccgcgaacgtgcggaacagcttttcgcgcacgtcgggtcgctccataaatgtcggaatgttgctctgcttgctgatgcccgcgcccgtaaacgccagaattttcataaagaccgtctccttggctctcaatttaaaggaacggcgcagattttaagcctgcgccgttcttttttatataaattcaattttactgcgctttaccgatctccaaggcttttctattgaaaccgagcatatccgcttttcttgcgggaatacacttttgcagcgctttatcgagcgtttcttccgtgcagaacgcaagctccttgcgcagcttaccgaccaagatgatattcgcaaggcctttcagtccgttttcctccgccagttttgatgccgggacatagaaaacggtcacgtcgtcgcgctctacacgctcgtcgatgaggctgctgtcgagtaagatcgtgccgccgggctcgacctcgttcacgaacttatcgagcgacgggcgattcatggcgatgagcacgttcggattcgtcacaagcggcgagccgatgggttcatcggagagacaaatgctgcaattcgcggtgccgccgcgcatctccgggccgtaggacggcagccaagagagctccctgccctcgatgaggcctgcatacgccacaactttaccggcgaacaaaatgccctgaccgccgaaaccggcaaaaacgatgttcaagtctttcatttcagcctgtccccctttgtgccgtctttatacacgccgagcgggtagtacggaaccatgttcttttcgagccaatcgagcgcctcaaccggcgacatgccccagttcgtcgggcaggtggaaagcacctctacaatggagtagcccttgccctcgatctggttctggaacgcctttttaatggcctttttcgcaatgttgacgttcttcacgttgtcgacggtcacgcgctgtgcaagcgccacgccgtccagtgtggagagcatctcgcagatgcgcaccgggtagcccgcggtgtttacgtcacggccgtacggggtggtctgcgtgacctggttcggcagagacgtcggcgccatctggccgccggtcatgccgtaaattgcgttgtttacaaagataacggtgatgttctcgccgcgcgttgccgcgtgtacggtctccgccgtaccgatggccgcaaggtcgccgtcgccctgataggtaaatacaacgtcctccggtcttgcacgcttgatgcccgtcgcaaccgcctgggctctgccgtgcggcgcctgcaccatgtcgcaggtgaaataatcgtagcacataacggagcagccgaccgaggccacaccgaccgttttgccgtcaatgccgagttcttctatcgcttccgcaacaaggcggtgaatgatgccgtgcgtacagccggggcaataatgcagcggcgcgtctgttaacgtagacggctttttaaatacaactgccatttgattctatcctttcgccttatttcaaaagtttatcgatctcgcctaaaatttccttcggggtgggaatcacaccgccggtgcggccgtagaagtgcaccggcacacggcactctgccgcaagacgcacatcgtctaccatctggcccatgctcatctccacaacgagcagctctttggcgtgatctgccgcgcgcttgattgcgtccttcgggaacggccacagcgtgatgggacgaattaaaccgaccttcttgccggcttcacgcgccttattcacggcgctgcgcgccacacggctcgatgcgccgtaagcgacgacgatgacatccgcgtcctccgtgcggtattcctccgcacgctgctccttttcttcgacgatcttatagcgctcgtagcgggcacgcacaaggtcttcaagggcgttcggcgtaaggtaaagggagttgatgatgttgtgctctcttttattttcgtggccgcaggctgcccacggcttttcgggaagctttctgtctttgtgctccggcagctccaccggctccatcatctggcccagcatgccgtctgcaaggatcatcgcgggcatgcggtattcgtcggctttatcgaatgcgtcggaaacgaggtcgaccatttcctgcaccgtggacggcgcgaaaacgagaatctggaagtcaccgtggccgagggctttcgtcgcctgccagtaatcggactgtgagggctgaatgccgccgaggcccgggccgccgcgctgcacgttgatgatgagcgccggcaagtcggagcctgccatataggaaatgccttcgcccttaaggctgatgccgggcgagcttgaagacgtcatggcgcgcacgccggccgcagccgcacccagcaccatattgaccgccgcaatctccgattcagcctgcaaatatgtaccgccgatcttcggcatacgctttgccatataagccgcaagctctgtctgcggtgtgatgggatagccgaagaaatgatgacatcccgcctgaatagcggcttcggccagggcttcgttgcccttcatcaaaactttttctgccatagtttttaactcctctctcagcgttccaccgtgatcgccgaatccgggcacatggtcgcgcatgccgcacagcccacgcacgctgcctcatcggtcagctctgcggggtgatagcccttcgcgttcaaacgatccttcgcgagcgcgatgatctttttcggacacgcgtgaatgcacatggagcagcctttacatactttttcgtctacaatgatccttgccattcggtttcctcctttatcctactcggtttcgtcttcccagacgaaacgtacatatcgctttaccgctttaaatccctcgggcagtgtgttttccaccgcaaaatccggcacggtggaatagagaagcggcagatgacataattctgcggcttttttcgcaaacggcacagcatcaagcaccgtttgcatatcggtctgcacagcgaggttggaattgttcacgattgccgtcgctttcaggtgcgatgccgtttcgatctcccgaaggagcggaagcgtttcttccggctttgtggaaagcacgcgataccggtttacgacgtacagcatctcgtacccggcagtctcgatttgccgatgcagctgcccgagcgccgtagcgcccacgtcgtcgccgcccgcatcgataaaaatatcggcgttctccatattaaagatggagaagatctccggcggcagcacaggggtatcgagcgttgtgttcgcgaacaccggcgcgatgagttccacgccgagttttttgagcagcgcggaataatccgacgagcggaaatacgggttcacgacgtccatatcgacaacaacgctgcgtctgccgcgctgcgccgcctctgctgccaaattcagcacgagattggtctttccgcagccgtaatgcccgcaaatgaccgtaatggagcttttcatgcgctcaccctttcttctataaataaagcggtccggtactcatcatcataccaccggaccgccaaaaaatcaacctttcccgccgacttcgccgctttattcataaatttttataagtcttacaaaatgtgggattcgtgaaaatcttttaggctttcggttctttggcggtgttgatggaagaaatcagcattcttcggatagtgccgcataaggtatacagctcccgcgccgcctctctgcccaaaatatcggatttcacaaatatctctatccaatactccgtttcataacactctttgagcgcgatttgcagctttgcaatgaagtccgcttttccgtgcgcatagttcgcttcccgaatattcgcaccgatggaagttgcggagcgctcaagctgattaacgatagaccgatgcccgtggatcgtttccgttaactttatcgccttgaccgcaaagtccgtcgatagatcgcgcaatttggattctgacacgctatcaccttcctttttaggaaagtatagcataactttagcaatgagaaatatatttaaaggaaattagaaattttcagaagttttttagtgaaatattttgctgatgcaaaatgtgaaataatgctaacgcattgtgaaatttgatgccagcatcaagtgaaatgaaataaatccacgcacgcccgcaggcatttcacacgccataggcgtatttcacgtgcgaagcacatttcacaaatccgcaaggatttatttcgttgaaaaagagacctgacacatcgtgtcaggtctctttttctggagcggacgacgaggctcgaactcgctacctccaccttggcaaggtggcgctctaccagatgagctacgtccgcatttcggatttcgtgtcacttgtttcgcgacgtgacttattataacggagatggcccgatttgtcaagcctatttttgaattttttccgacttttttcgtaagtgcttgcaatccgtgaaaaaactgctatactttatgcaatgattttcggcagcactgtgcgaatacggagctgctttctgttattttagaaggagttatgtttatgtattgtaaaacctgccgccaaccgctgcctcacgatgcccgccgctgtccaaactgcggcgcacctgttgaaaacaccgtaccgcaaagcggcgcacgggatttcaccgccgactacgacccgcgcgacattcaggagaatcgcggctggggcattctttcctacttcggctttttggtactcatccccattttcgctgcgcgcaactcgtattttgcgcgttttcacgcaaaccaggggcttgtgctgtttcttttctacgcgtgctattcggtgctgacgcgcatcatcacgaacatcttaaacctcgcgctcggctttataccgtttgtgccgggcatgatctccgccgcactgcaatttatcggcatcatcttctttgtgctgatgatcctcggcatcgcaaacgccgcttccggcaaagtaaaggagttgccgttcatcggccgtattcgccttttaaaataaccgtacatagcaaaattgccctgcgggattttctttcacagggtatttttatacgtgaatttcgcaaaaccgttgcgcacaaagtcgatatatgctatactgcgtaaggaaaaattcagcgttcggcggattttaatcaagcggcaacgcgggggagcgcccgatttgccgtgccggactgctttcacatagcgatgggactccgtgtttcggattgagaggaagcaattgagcttcgaccgcccggcctgaatttacattcgggcgcgcttcgctatgtgcatttgtgcgcctcttttaaatatgggtcggaaacgcttatatttagagaggtacaaaaaatgaaaagagaacacattctgaaaatggtcatgcttgcaatgctcgtcgccatcggcgtcgtcatttcgccgattttgcgcgtggagggcatgtgccccatggcgcatctcatcaacattgtctgctccgttttcctcggtccatggtattccctgctgtgcgccacgcttatcggcatcattcgtatgacgctgatgggcattccgccgcttgccttaaccggcgcggtgttcggcgcgtttctttccggcgtattttaccgtctttcgggcggcaagatcctttgcgcagtgctcggcgaagtgttcggcaccggcgtcatcggcgcgctggcttcttatccggtgatgacgtacatcgtcgggcgcgaggggttgacatgggctttttatattccgtcgttcatcggcggcacgctgatcggcggctccattgcgttcgtgttcctcatggcgctgcgccgcaacggactgcttgcaaaattccagcatgatttgggggcgaaggtctatgacaccactgctgcaaaacgcgctgctcaaagcacgaaatgatctgcgcgagacggcgccgctcatccactgcatcacgaacccgattgcgattaacgactgtgcgaacgggattctcgccgtgggcggaaagcccatcatggcggagcatcccgacgaggtggaggaaatcacgtgcatagcgggagcgctcggcgtaaacatcggcaacatcacagacgcgcgccgcacctccgttttgacgagtgccaaggcggcgaaaacggccggtgtgccgatctcttttgacgcggtgggcgtgacgtgcagcgccctgcgccgcgacctgacgcacacgctgctgcgcgaggcttgcccggaaattttgaagggcaacgacgcggagattcgcgccattgcgggcgcgcattttgaaagtcgcggcattgatgttttacggacaaacacggcggaaacgattgaaattgcaaaaatgctcgcctctaccctgcactgcgtggtgctcgtcaccggcaaaacggacattatcacaaacggcgaaacaactgagctgtgcgaaaacggcacaccacgcctgtcgctcgtcaccggcacgggctgcatggtacacgcgttgtgcgcttcatacagcgccgtgacggatccgtttacggctgcggttttagccgtttccaccatgggcatttgcggcgagctggccgaacggaaatccgaggggctcgggtcgttccgcattgcgcttttggacgcactttcgctgctttcggacgatgattacacgcgtttattacagctgcgcgaagtttaaaagaaggagtttttctatgaaattcgatcctaccttataccttgtgaccgacagcaccggccgcacggacgatgactttctttccatcctcgaaaaggcactcacgggcggtgtgacgctggtgcagctgcgcgaaaaagagcgcggcggcggtgaatacctgcgccttgcgcgcctcacaaaagctgtttgcgaccgttaccgcgtgccgcttatcatcgacgaccgcgcggacatcgccatggcggcagatgcggcgggcgtacacgtaggtcaaagtgatctgcccgtctgtgaagcaagaaagcttttaggtgaagataaaatcgtcggcgcaacggcaaaaaccgtggagcaggcgcagaaagcgtaccgcgaaggcgcggactacctcggcacgggcgcgatcttcccgacgaccacgaaggtgaaaaccgtgctgacgccggtttcgcgcctgaacgatgtctgccgcagcgtgccgatcccggtcgtggccataggcggtttaaatgccgggaacatggatgttttgaatggcagtcccattgacggcatagcggtcgtttcggccatcatgaagagtgcagatcccgaagctgccgcgcgggagcttttcgcgcgcgtgcgggtgattaaagaaaataaccgctgaaaggcatagaatgctacactttgtgctgatttcacaaattgaaacgacatttggcggtgaaatcttttccgaaatgacacacggtttttacgcgcggtttattgactctgcgttttaccggtagtatgataatggtagaagcaaaattccccataatttgcgtacaagccactttttataaatccacaccttaaacgaaaaaatcaccgagtttttcctcggtgattttttcgttataaagcgtcggcaaaaagatttttcgttctttttgccggcgctctctgtttattcttaaaaacttttacagtgtaaacgtatacgtacccgcggtgagcgtcatttcttccgtagtgccgtcttttttcggcaggtagacttccgcttcggcgtcaaacgggatgacgacggtatacgtcacttcgccgttatcctcgtactgccagccggtttcatagtagcctgcggcggtattgaccttggcttttgccgcgccgagccttacatcgggctgcgggcggatgacggcctttttataaccgggcacgtccggcacggggttcaggccgcagacgttcttatacacccattcgaacaccgcgccgtaagcgtagtggttcatggagttcatgccgatgccgctgatcttaccgtccggattgacggagttccagcgctcccagatcgttgtggcacccatattgacctcatacagccagccgggattttcctcgttcaaaagcagcgtataggcttctgcattcgcgccgttatcggagagcgcgcggcacagcacaggtgtgccgaggaagccggtcttcagcttgcctttattcatcgcgagcaggccgcgcagggtttcggtgatcttctcgcgcgcgaactccggcgcaagcccaaacgaaagcgaaatggcgttgccggtctgcgttgcggccgcgcatctgccgcccgcagtgtaaaactcgcggcggatggcgtcgagaatttcgtctgcacgctttttgtagacgtcgtactcggtcgttttgccgagcgcgcgtgcggcgtttgcaacgcacatggtgctcttatagtagtaggcggagcacaggaatgtaatgtccgtgccgccgagaacagactcgggattgaagccggattccgggccgtccagtgcaagccaatcggcaaagtggaactcaatgcccggccacagacgcgttgcgccgtgcgcttcatcgtagcggtagatccaatccgcccacagcttcatgctctcgaagccgttttcgagcacgctgatatcgcccgttgcaatgtaggtttcccaagggacgatggccgcggcatctgcccagccacagtgaccgccgccgtttgcgagcattgggtttgcttcgcccggcttgcggctgatgagcagcggggcaacatccggcaccttgccgtcaaggcgcttctgttcctccaaaaggtctcggatatacttcgtatagaacgcgccgcaatccatgttgtagttcgccgtggggcagaacgcctgcgcgtcgcccgtccagcccatgcgctcgtcgcgctgcgggcagtcggtcggcacgtcgaggaagttatcgcgctgactccagacagagttcaaatacaggcggttgaccttctcgtttgcggtcgtgatctcgccggtttgctcgaggtcggaatacatggcccacgcctgaatatccgtgatgccggtgaggtctgccacgccggagaatttgatgtagcggaagccgtagaaggtcgcaatcggtcgaataaaggcttttttgcccgtcgaaatatagcggtattcggaaagtgcagtgcgcaggttatcgcggtagaagcagtcatcctgcaacagctcgccggtctgcacgcgcagctcgacacctgcgggcaggtcggccatgaacgtgaaccaacccgtaatgttctggccgaggtcgaacacaagctcgtttttcggcgtggtgatctgcttcggggtgatgatatgctttgcttttacgggcagcgagaggcgcgcggaaattgcgccgaggttcgtcgtggtgttgcgcttcaccggctgccaatttgcataggtgcaggacggcgcgcaccagttttcgatttcgaggttcgcatcgtagcgctcgccgtcgtagatgttgccgaacgtcagcgggttcggcgcgcactgccagctttcgtccgtgacgatgacggtctcgccctgcgtggtggtgacgtgcagctcaccgaagagcaggtattcctctgtgtacatgttgcagggttttcccgggaaattcgtttcgtaatcgccgacgacgccgtcaaaaccaaagcggcctttcgcccagccgttgcccaaaatggcgccgatgacgttttcgccggtgtgaatgaggtcggtcacgtcgtaggtctggtactgaatccagctgtcgtaggcagtgcaaccggggacaagatactcatcgttcgccttttcgccgttcaaatagagctcgtagatgccgagacccgtgaagtatgcgcgggcagagagaacttcgccggtgatctcaaacgcgcggcgcatgtacggggcggtgtccggcgcaaggcacggagaaatacgctgtgccgtgaacggctcgtcgagctttgcggtctcgaaccacgcagtgtcgcttgtgaccaattcaccgttatcgcccataacggtaacgcgccagaagtagcgcgtgcggggctcgagggcgatttccaccggtacaccgagggacgacgcggttttgcacgcgccggtatcaaagataacgtcggcaaaatccttcgttttggaaacctccacgcgcgcccaaagctgctttttcgcttcggtatccgtgactgtccacgagacgtgcggcgttttcagatcaaaaccgagcgggttgacgatacggtttgttttcattctctgaattttcatgttccgttcctttctgtgcgtttgcacgtgcggctttttcctttgccgcttcgtattccggccgcgtaaagctgcggcattttgttctatttcacagaatatcagatatgaagatgaaaaacaaggactcaattttcgcaaaaatacgtccttattttcagtaattgcatgcgaagatgttgaactaagccgtttttaaaagttcttataggttagccgcgactttagcttgacacaagtccatatttgtggtttaataagcaaacatgagtatcggtgccgcaaagcggcactgcgataagggagtagtcggcgcgaagcgctgtatggtcgacacacttgaggaaactcacggctatgcatgaaatgacgagacttatccgaaaggcatctccggcttttcgggtgagtcttttttattgcccgcgcacgtatacttttatgccaaaacaatggaaaacggtgatcaaaatgagcttatgggaactcttaattctggcagtcggtctttcaatggacgcatttgcggtttcggtatgtaaggggctttcagtgaaaaagctgaaagcgaaacacatgctgactgtgggtgtatattttggcggatttcaggcactgatgcctcttttggggtacattttgggtatacagttccagtcaatgattcagcagttcgaccactggatcgcgtttgtgctgctggtgctgatcggcctgagcatgataaaggaatcgcgcgaggaagcggagaacctcaacgattcgttcagctttatgacgatgctgccgctcgcggtggcgacgagcatcgacgcgctggcggtgggcgtaacgttcgcatttttgcaggtcaaaatcgtaccggccatcagctttatcggcgcaacgacgttcattctttcggcgatcggtattcgcatcggcaacattttcggcgcgaagtataaatcgaaagcagagcttgtcggcggcatcgtgctgattttgatgggtgtgaaaattttgttagagcacctcggcgtactggatatgattttcggttaagaaccggaaacaagaaagcgccccgcttccttttatggaaagcggggcgctgttttgttttagtttacgaactaaagtaacccgttaaattacttctgtgcgtcgtagtaatcctgatatgcggtgtagccctggagctcgatgttcgatgcacgcttatcggtgtagatcttctcaatgtcatgaacctgattggactcagcaaagtctttcagatcctgaacgagcttatcgaacgttgcgtcgtcggaagccatgatgatctgcgggatacgcatcttgcactcatcggtgatagcctgtcttgccataccgaggtcatcgttcggatcgatctcaagagagaggttggcgttttcgtcggtcaggaacttctggccggggactgccggatggatggaatcttccggagtgaagacgtgagcctgaatggagataacccagcttctggattcttcgggctgtgcatcgttaactgcatacttcgtcaagtcaacgttatcggcgtgagccggctgagcccagaaccagcaacctgctgcgttcttttcgtcagaggtaagctcttcttccggcttcttgaggatcgggttgccgttttcgtccttgccttcccagaggccgccctcaggaccgtacatcatgttgatggagccgtccttcgtgagcatccaagaatagagatcgaagatacgctgcgggttttcagcctttgtggtgatgcagttgacgttgctaccaggcgtgccgttttcttcgccatatacccaatctacgccttcagccggcgggaagatcggagaatccttaagctcccaaccgaggagatcgtaggtgttgccgtctttctcctgaaggagggtacggaagtggttggtatcgtcctgagagaagtcatagtacagaaccgctccacggccgttggagagcttctctacgtactgatcgttgctgtcggtataaatggtttccgggaagaggccttctctaaaccactggttagcaatcttcagagcggagacgtagttgtcgtcaaagacagcaagcttaatgtcgttatccgcctgagaccagtatgtatcaacaaggttcgggttgccgtaggaacgatagatagcggaaacggtgttgaagccgttatcgtcctgtctcgggagccacgggaagatgctctggccgtcggaagttgtaacgcccttgtccttagcatccagcatgaactggtgcaggtcttcgagcgtcttgagctccggagaaccgagctgctcataaacgtcttggttgaccatccagctcgcgttaccgccggtagcgcccttacgagcccagttcgggataccatagagaccgccgttaacggacagcagcttctgggaggattcgaggatgtcctcatcaaaggagcagccttcatacttcaaggtgttgatatcgacgagcttgccgaggctgatgagcttctgccagttcgcgttacggtccatgatgataacatccggcaggtcgtcggaggagatcatcaggttcagtctggaatccgcatcagcttccgggcaggaatagttgaccgtgatgttgaacttttcgttcatgtacttcgatgcagcgtcttcgccccagggcttaacggaaccctgatagctgtaatatgcatcaaattcgtagtgctcggtggtgtcgtccgggccggaggaaccggttacctcggagcttgcgtcaccgccgtctgtggattccgctgcggaagattccgttttggaagatgtgctgctgccagccgtggaagagtttccgccgccgccgcagccggctactgtcagaatcatggatgctgccatgactgctgccagagccttcaagagagagtttctggacttcatactttgcctccttaaagaatgcttcgtcaatacaccttgcattgacaatttattttatgattagcccttaacggagccgatcataatgccttttacgaagtagcgctgcaggaacgggtaaacgatgatgatcggaatgatcgtaacaaacatcgtagccattgtgatggagcgcacgttggtctccttgcccttcaacatgttggcgtcgatggtgacgcccatgcccgcagaggccatctgttctgcgaacttcgcttcgttgacgattccgagaaggacgttctgcatcggcttcaggtaatcctgtgtaatgtacaggtttgcctggaaccagtcgttccagtgctgcacaccgaagtacagggcgatcgtcgcgatgatcggtgtggagagcgggaagtaaattttaaagaagatggttatgtagtttgcgccgtcgatgagggcggattcttcaagcgcttccggcagagactggaagtagctgcgcatgagaatcatgttccacaggttgacgagtgccgggatgatgtacacgaggaagttgttcttgagaccgagattgaggatcaagaagtaggtcggcatgaggccgccgccgaagtacatcgggataagacacagcattgcgtaaacttttttgcctacgaggttcgttctggaaattgcgaacgccagcataccggtaatgagcacgccgccgaccgtaccgatgacggtacgtgcgatggtgatgaagtacgccatccagatcttctggtttgtgaaaaccagctcgtagtttctccacgtaaacttacgcggatagatggtcaaaccaccaagggtggtatcgttggaatcgttcaaggaaatcgcaagggcattcaggaacgggtacagcgtaaggacaagaaccagaacgatggtgacgatcatgatgatatcgatcacgtagtcgctggccacgcgcttggcgcggattttgtttggattttttgccatctctctgttccccccttagaaaagctgtgcttcgccgaatttacctgctacgtagttggaaccaaggagcagtgcgaagttgacgatagacttaaagagaccggccgctgctgcgaaggagaaacgaccctggctgacacccaaacgataaatgaaggtatcgagcacgtctgcgtattctttcaacatggagttgcccatctgcttggtgagcatcatgatctggtcgaagtttgcattcaggatgccgccgacctggaagataaacatcaggatgatggtcggtttgatggacttaattgtgatatgccacatcttctgtgcgcgcgttgcgccgtcgatatcagccgcttcatacatatcctggctgatgctcgtgatagcggagatgaagataatcgcgttccagccaagctccttccagatatccgtgcacaatgtaatgccccagaagtacttgccttcggtgaagaagccgatcggttctttaacgacgccgatccacatgaggaactcattgatggcgccgccgtcggtggacatgaggtcaaacatcaacgttgcacatacaacccaagagatgaagtgcggcaggtagctgacggtctgaaccgtttttttcagcggctggaagttcatttcgttcagcagcactgcgaagagaatcggcagcgggaagccaatgaacatcttaagggcgctgatgaccagcgtgttgcgcatagccagtccgaagtacttatcggcaaacatggtctggaagtgtttgaagcctacccactggctgaagcccgggaaatcaccgagctggaaatcctggaagcccataaccacgccgtacatcggtacgtagctgaacaggaggactaagaggatgccgggaactaacaatatctgcagatcccactgggcaagcattctggaaaagacgttctttttgcgtaagaccgtatttccactcgcttgtgcttgtttcaatctcatcacgctccatttccacaaaagatggaaaattttttacaaaaagcagaactcaaagcctgcttaaagccaaattttttgaaacccgactgccttttgcagttttacggttttctcgttgaaagccctgaacgatgttcggatggtttccaaatttgtctaaatctccgcaacaacttcttcaggaattgttcatattatacacacgcattcgtaacaattcaaggacaaattatgcaaagtgtaggtttgtcaaacatattggacagcgaactcattaggcgagagccagcggaggggtctcatgggcaagttgttggcgcggcggttatggacggcaagctgcttggcaaagtcgtcgagtgaatagaacgaatggcaggaatagaagcgtttctgatcctcacggtggctgcgctccaccttgccgttgtggcgcggcgtgtagggccggatcagcttgtgacggatgcccagctcggcggcagttttctcgaacagtgtgggcagatcgcgcttgctgttggagaaacgattggtgaactcgaaaccgttgtccgtctggacacactccacttctatgcctctgcgggcgtaccacgcccgcagcttgcgcaggaagtccgccgaggaataggtggactgctccgggtaggccgccaggaaacgcagccttgtgaactcgtcgatggcggtgtactggaacaggcgcagctccggatctgcgatacagcggcgggggacgaccttgacatctacctgcacgcgctggccgggataggtcatctgctcgtaaggcttcggcttgtacggatttttgggcttttcggccggaaacagccccattttgcgcataacgcggaacaagctctccggacagcgggtgtagccgcgcttccgcagacggtgccacagttcgatcatgcccagcgacggattgcggcggcgcatatcgcggatgagctttagctcggcctccgtgtgctggttggggtggctgtgaggccgtctggactggcaggccagagacgccacactcccgtcccagcgctgcttccagaagtagatgtacgaccggctcttgttgtatttccggctggcgcggctgacgccgtacttttctgcgtacttcattagggattgtctgtaggccatgtcctgtgttatactcttactcatgaggaatatggtctcctttcggaaagtttggtgtggtagcttaactttaacacatgaggccctattcctcataccctttttattcaattgtccaagatgtattgtagtcctacaaacaattcaaggacaaattatgcaaagcatattgacaaattgtgcaaaccgtgtacaatataggtacaaaaagtaaattttgtggtgaagttggtgggcatatgttacaaagtactatcttagacacacaaaaatgcgagcatgaaaccgcatccattttgaacaattttactattgccttcggaaaggtgcattggggcttcccggatttcgaaaacttggatgaattgttcgaaaatcagcagtttgttttgatgctctgcgtcaaagcttcgtctgaaaaaagtgatttatatttgaataacgacatttttaatgtaattaccggaggggtaatttgtgtgcgccgcagcgataaaatcctttggaatcactgctgctgcgagaacatgcagattctttggcttccctttacaatgaaatgcgtttccgactgttcctgcgaagacgccgatgttttaaatgactttttgtgtggaaagctgagccctgtcggttataatacacagctgattgattacagcgactttctcagaaagcgcgtttgcaactataccaagtgctgcctgaaccaagttctttccggatttatactggactgcatttttacccttaagcaaaattacgacggcctctccaacaaggacaaaatcacccaatacctgctcgaccacgcaacggagaagatcagcgtgccggaacttgcgaaaaagctttcgatttccgaacgcgcactgttctattattttcaagataacttcggttccaccccgagcaattacattaatcgtatacgcatgaacgccgccgcagagcacatccaccgcgggttatccgtgaaagaagtgaccgaaatgtaccacttttcggaatcttctgcgttctgccggttatttaagaagtacttcggcatcacgccgacggaataccggcagctggcagagaaatcgcagctgaaaatcgtctcgcgggacgagctgaaggattaaccgtatatctttcacgcgatccatagataacaaaacaccgcccgttcggaaaagctccgagcggacggtgttctttatcttatattatattgtattcgatcagtcaatgaccttgttgtcgcgatccggaacaattttttcaaggaactgctctacggtcatggcgccgaggtcgccctctttgcgcttacggatagagatggtgttgttttcgatgtccttatcgccgacaacgaccatgtacggcaccttttcgagctgtgcttcgcgaatcttgtagccaatcttctcgctgcggtcgtcgacctcgcagcggaagcccttgtcttcaagctgcttcttgacttcatagagatagtcgaggtggcggtctgcgatgggcagcagcttcacctgtaccggggcgagccacagcgggaacgcgcctgcgtacttttcgatgagcaacgcgagggtacgctcgtagcagccgatggaggtacggtgaatgatgcacggggtcttctgcttgccgtccttatcggtgtagaccatgccgaactgctcggcaagcatctggtcaatctgaatggtgataagcgtatcttccttgccgtacacgttcttaatctggatatcgagcttcgggccgtagaacgcagcttcgccgatgccgatctcgtacggaatctcgaggtgattaaggatgcgctccatgaggccctgtgcctcgttccactgctcttccgtaccgatatactttgcacggtcattcgggtcccattgcgagaagcggtaggaaacgtcctcatacagaccgagtgtcttcagcatgaagattgcaagctccaggcactttctgaactcatcttccagctgctccggtgtgcacatgaggtggccttcggaaatggtgaactggcgcacacggatcaggccgtgcatctcgccgcttgcttcattacggaacagtgtggaggtctcgttgtagcgcagcggcaggtcgcggtaggaacgcttgcggtttaaataagcctgatactggaacgggcaggtcatcgggcgcagagcgaagacttccttgtccttctcctcgtcgccgagcacgaacatgccatccttataatgatcccagtgaccggagatcttgtacaggtcgctctttgccataaacggggtctttgtcagcagccagccgcggcgctgctcctcgtcctcgacgaagcgctgcagaagctgaacgatgcgtgcgcccttcggcagcaggatcggcaagccctgaccgataacgtcgcttgtggtgaaaagctccagctcacggccgagcttgttgtgatcgcgcttcttggcttcctccatcatggtgaggtgctcttccagcaagctctgcttcgggaacgcgatgccgtagagacgctgcagcatcttgttgcttgcatcgccgcgccagtatgcacctgtgatggaggtgagctttacagccttgacattgccggtgcgcatgaggtgcgggcctgcgcagaggtccgtgaaatcgccctgcttatagaaggagatgtgctcgccctcggcagcgtgctcacggatgagctcctctttatagtcctgacccttcatgagctccagtgcttccgcgaccggcagctcgaagcgttcaatctcgatgtcttccttgatgatcttcttcatctcggcttcgatctttgcgaggtcgtcgttggtgatggcctgcggcagctccatatcataatagaagccgttatccacagccgggccgatggcgaactttgtgcccgggtacaggcggtttaccgcctgcgccatgatgtgggacgcggtgtgccaatatgccttttttccctctttatcgtcaaacgtcaaaatctctactttgcaatcttcgttgagcacggtgcgcaggtcgcacacctcgccgttcacttttgcggcacatgcggacttataaagacccatgccgatgctttttgcgacttccgctacggaaacgccgctttcaaattccttttcgctgcccttcaggtcaaccttgatcatgattctcaatcctttcctaattctctgataaaataaaaagccccgggatccctcaccgggatctcggggcgacactgcgcggttccacccgagttcctgcgtgttaaaacacacttgtgttaacacacagctcgttcttccgccttaacgcggcggcaacgtccgccttttcggtaaaccgttcggcggcggctcaaaggcggtatttcggtttcgctttccgcggtgctttcagccggtggcaaccgctctctttcgaaaagacctgaacccgaacttccttatcaaagcccttttcttgtccccatactatcaccgtttttctgaaatgtcaacacccaagaaaagagtttttcacataaattcttcatcgtctattatcgtagacagtaaaatgtctatttacgcatacaatttgtgtagaggtgatacacttgctttgggaaaataatattgtggggcaaacaatacggtctgtgcgcaaagcaaaaggcatgtcgcaagaggttttaagcggctttgcgggcatcgcgcgcacgcatttgacgatgatcgagtgcggaacaaagcaggcgaatttctcgacgatatgcaagattgcggaagcgtttgacatgcgccccagcgagcttgtccgcaaaatggaagaagcggaagaaaagcgggataaatagacccgcagaaaaaatttttcttctaaaaagcaaaaaaatcggcttatatactgggctcttgtataaaacagaaagaaaccgtaattatttcttaaattctttggttgacatatgcaaggaaaagagataaaattgtacatggagtgttttacactttttaagtcagccgtgttccgagcagtttatgcggctgctttttgtgtggaaccttcacagggaataacgcaccctgcataacctaatttagtaattgaatatcgaaaaccttagcgaaggaggtgcccaatgccacaagtaccaatttggggttgtgttctgatcgtactggcagtcgccgctttgtgcggcgctctcgctttctttgcgggtgtgaatcatcgaaaaagagaagcggaagctgccatcggttcggcagaagacgaagccaagcggatcatcagcaacgcgatcaaaacggctgccgcaaagaaaaaggaagccgtgctcgagggcaaggacgaaattcatcgtctgcgcaacgagtccgaacgcgagatgaatgaccgcagaaaagaaattcagcgccaggagcgccgcgtttcccagaaggaagaatctttggataaaaagatggaaaatctggaatccaaagaaaacgcggtcgaaaataagatgcgcaaggcggaggaacgcctgaaagaggcagaatccgttaagaaaagtcagatcgacatgttggagaggatctcttcctttaccgtggaccaggcaaaagagtatttgctcaagttacttgaggatgatcttgtgcatgaaaaggccattaaagtaatggagtatgaacagcagacgaaggaagaatgcgacaagctggcaagagagatcatttcggtcgccattcagcgctgcgcggcggatcacgtatccgaagccgccatcagcgtcgttccgctgcccaacgatgaaatgaagggcagaatcatcggccgcgaaggccgtaacatccgcgccattgaacagcttaccggcgtggatctcatcatcgatgacacacctgaagccattacgctttcgagctttgagcccgtaagacgtgaagtggcaagaatcgcccttgaaaagctgatctcggatggcagaatccacccgaccagaattgaggagacgattgagaaagcccgccgcgaagtggatgcaaccattaaagccgagggcgaacgcgccgtgcttgctgccggcgtaaacggcattcaccatgagcttgttaagctgcttggtcggctgcgttaccgcaccagctatggacagaatgtcctcaaccactctctggaagtttcttaccttgccggtatgatggcttccgaactgggccttgaccccaccattgcaagaagagcaggtttgctgcatgatatcggcaaagcgctcgaccacgagattgaaggctcccatgtggagatcggcgtggatgttgcaagaaagtacaaggaaagcgaagccgttatccacgcaattgccgcacaccacggcgacattgaagcgaaaacggtcattgcctgcctggtgcaggcagccgacgccatctcggcagcacgccccggcgcgcgccgcgagaacatcgaaaactatatcaaacgtctcgaaaagctcgaggccgtggctgcatcgtttgacggtgtggatcgctgctacgccattcaggccggccgcgagatccgcgtcatggtaaagcccgaagtgatcaacgatgagaaaatgacgctgctcgcccgcgacatctgcaagaagattgaggaagacctcgaatatccgggtcagattaaggtcaacatgatccgtgaaagcagagcggtcgatttcgcgaaataacatagttcgtcacaacgctcaaccgaatcacaagcaaagccctccgggaggaatctcggagggcttttgttatgtaaaaccgcgcgtcggtaggttctcccccgcctcggcacacgattttactgtaaaaaaagcaacacctcttaccctgccgacaagatcaaacataaatgctcggattttcggtgctacggtcaaaaggcgttgctttgcaaaatacaattttaattatgtgctgaaatttgtgttagctttgacaaacggatcacacaaaatatgtgtaaaaaattcacattttgtcgattaagacgcattatccatctgcaaacacagtttatcggaaatcatggcgatgaactcgctgttcgtgggcttgccccgcgtattgtgaatggtgtaaccgaaatacgaattcaacacatccacatcaccgcgatcccaagcgacttcgatcgcatggcgaatggcgcgttccacacgggagctcgtggtctcgtactgctttgccacactcggataaagctgttttgtcaccgcattgataatctccgggtcttcgatggccatgatgatggaatcccgaagatagtggtatcccttaatgtgggccggcacgccaatctgatgcagaatctccgtgacctgaatgcgcaggtcgctgcggctggtgccgtttgacggatgctgtgccgcaccggccaacgtaaagatacggtcgatgatctctgttttactgaacggctggatggcgtaataatctgcgccggcctccatgatctgccgctccaaagcgtttgaggaatgcgctgccgtgatgatgaacaccggctttggcagtccctcggccttcacagcgtgcataacgcccagtgcatctacgcccgccataaagagatccattacgaccacatccggtttttcatcccgtattttggtcagtagcgctgttccgttcctgtttacggtcacaacctgtgcaccccgcgaagccaatgcgtcggtgttttcacggctccattcgccgtcatccgcacaaatgatgacctttatttgcttttccatggcttacctcctgcgtgatttaaattgtgaacaaattttaccatatcatacacgctatttcaagagggtaaatgaaatttctttaatttatttgttttctaacaaaaatatggatcttgattttgttagctttcatcacggtttcggttgatacacttctaatttcgacaaaaatcagcagataatcaaatatttttattacagccaatatcccggcgagtttcttaccaaaaagatgtataaaacagaacgaaaaccgattctgtaagattgtgtcataccttctgtgagaaatatgacaatgcggcgcgaaaaagggacgcgtgcgccgcagcccaccgtccccctcgtcttaattttcgttcaggttttcgagcatcgtttcggcaaaaatgccatagccgcgtgtagcatcatctacgaaaacatgcgtcaccgcaccgaccagcttaccgtcctgcaaaatggggcaaccgctcatgccctgcacaatgccgccggtacgggcaagtagctccggatcggtcacgtgcagcacaagggtgcgtgtttcctgcttgccgtctgtgctgacgcgctcaagctccgcatcaaacagccgcataccctcatcgtcgatcgtggcggcgatctgtacggcacctgtatgcacatttccgcgcggcagcacctctacggtctcgccctcgtgcggtgcggagagtttgccgtaaagcccaaactgcgtgttctgcgtcagcgtgccaaggctcttgccgcccgtaaaatacccgcgcaggcggcccggccgaccgctgctgccgcgctcgatgccgcagacggaaacggcagccggctcgccgctgcggatctccaaaacattgcgcgtgtcggcatcgcaaatgccgtggccgagcgcgccgaacgctttgccgtcttcggtgtaaaacgtcacggtgccgatgcccgcagcgctgtcccgcacccacatgcccgctttgtacgagccctcgcacaaaacggaagtaacctgcgccgtgaacgtttccgtgccgcgccgcagcgtgagcgtgttcgtttcattttcggaaagcacagcggaaagcgcagcgttcgtctctacgttattgccgtttacggaaaggatataatcgccgggctgaatgccggcttcgcttgcagggcattttaagccaccgtctgcataaatttccgaaagtgcggcaacaataacgccgtccgaaaaaagttttatgccgaaaacatcgccgccaagctgcacggtgcgcaccgtttctgtctttgccgtgatatgggaagcagaaacggcgtgcgccgctgcgttttccggcagcggcaggccgatgagcccgcacacggaaagcatcagtaaagccgccgtgcccacgcttgccgcaaatgtgcggatgccctcaaaaagcgagatgtcgcgtcgttttggggcgtgcggttgcggttcattttcaaaattcaagtcttctcatctccttgcagaaaaattcagaaagctcaaacgagccttctgtttttacttttccacgcggagagaaaagtatttgcggcaattaaaaacacctttgcacaacgaaggaaatcgttacgcaaaggcgatcgtttttggtctgccgcactgccgggctcgcagcacccggcagaggacagtggggtaaaaaataggggtaatatcggaagaaacgaactgtttccgattttcggctccgcgcaaacgctgtggggaagcagcgcccggctatcgacccggtgcggaacgttttaaagaaatgaaggaagtaaaaaatgaagaagtttgtaactcattcggctctctcttgttcctcctgagtacattacgtagtatagaggaagaatatgaaaacgaaattgatatttcgtgaaaaaaggaggaagtttttttgaaaaacatgtgaacaaaaaaggccgcatactccacaaattttgattgactttcggcggaaaagctgttatactttggatagtgtaataaacaatgtcaatgtctcacaggttttctttgtaagtcattctttgggtggtttacaggacctgtgtttttttgtatggcgtttacgaacacaatctttatttttatatggaggtaccacaatgaacaacggtacagtcaaatggtttaacgcagaaaagggctacggcttcatttccaacgatgagggcggcgaggacgtattcgtacatttctccgcaattcagggcgacggcttcaagacgttgaacgaaggccagaaggtcacctttgagaccgagaccgacccgaagaacggcaagctccgcgcagcaaatgtcgtaaagctctaattgtaaattagaacagcgagataaaaggcacctgtgattgatttcaccggtgcttttttcttttgcataagcttcgcttttcggcgcacaatactgtgggaaggaagggatgccaaatgcaaaagaaaaacgaaaagaagttcacccacggcgagcatgtgacgatttaccctgatgcgccggagagcgtcgcaagcgccacggagtgcaccggcctcatgcctacgccgccgcaaaacgacgcggagtttacgtcgtaccaagacctgcacagcatggagatccccaaaaagctccccggcaagcggaactttgagcttggcgtgtacgacgataagccggaagatattcagttataaaaagtcagcctcatcggtcggattcggcgcgatgaggctggttactttttagctttatattcgcttgttttactcttccagctgtgcggtataaagctggtagtagtggcccttttgttccatgagctcgtcgtggctgccgctttcggcaatgcccttattcgagatgtacaggatgcggtcacaatttttgatggtggacaggcggtgcgcgatgatgaagcttgttctgccctttaaaagcgcctgcaggccttcctgcaaaaggcgctcggtcttcgcatcaatggaggacgtggcttcgtccagcacgagaatcttcgggtcggacagcagcgttcttgcaaacgcaataagctgcttttggccctgcgagaggcgcgagccgcgctcgtttacctgcgtatagtagccatccggcatttcgctgatgaactcatgcgcacgcacggtctttgcagcggcgatgatctcctcatccgtggcgtccaagcggccgtagcggatgttatccatgatggtgccggagaaaatgaagctgtcctgcagcatgatgcccatttgcgcgcgcagcgagtgcagcgtcaccttggagatgtcgtgcccatcgacgagcacccggccggaattgatgttgtagaaacgcgagatgaggttgacaaccgtcgttttgccggcacccgtggggccgacaagcgcgatggactcgcccgctttcacatcgagattgaagtgctccagaacgttgatggagccgtcgtaagagaatgtcacgtcgtcgaacgtcacgtcgcccttaatcggcggcagctccgttgcgtccggcgcgtcatcgacaagcacgggctcatcgatcatctcgaagatacgctccagatacgccacggcgttgatgaacgtgttgtagaggttggaaagctgcaaaatcggctgccagaagcgccacgcatacgcggaaatggcgatgagcgtaccgatttgcacggcgggacccaaaagcgagaagcccacaaggtacatagcgccaacgacccatgtggagatgttgttgacggaaaaccacacgaggttcgaggtgtactgcgccttcatccagcttttgtacattttggtgttaagattgttgtagatcttcgcattttcctcttcacgcgtgaacgcctgcgtgatcttcataccgtcaaggctctcgtgcaggtaggcgttgaggttggagctcttattggaaacatcctgccaagcgcggcgctgtgcaggcttgatgacgagcacaatgatgaggaacagcggaatgcccgccatgacgacgagcgagagcctgacatcgcacatgaacatgaacacggcgatgagaatgaggttgaaaatttcgagaatgaaattgatgatgccgttggaaagcgcatcggaaacagagttcacgtagttgatgacacgcgtcagaattttgccgtgcgggcggtcgtcgtagaactggaacgaaagccgctgcaaatgctcaaagagatccttgcggatgtcgtagatgatggcctgccccaccaccgtcatgtagcgtgagcgcttgacggaaaagaaaatggaaagcagaatggataagagcatgatgcctgccagaatgaacagcattttataatcgcggttcggcacggcgacgttcagggcggtctcgatgagcttaggacctacaagcgcacacgcggcggaaatggcggagaaaacgagcgataagatcattttctgtttgtgccgcttgatatacacgcctgcacgcagcaagtgtttgatattaaatggggtttccagcgtttcgtcaacgtcaaaacggtttcttgccattacgcagcaccccctttcttttcaccggcaatgccgttttgcagttcataaacctcgcggtaatagcccgggcgggaaatgagctcttcgtgcgtgccgacatccacaacgcggcccttatcaaggatcacgatgcggtctgcgcgcttcgtggtggaaatacgctgcgcgacaatgatcttcgtgcagtcgaaatcaaggtgcgcaagctggtcttgaatatatttttcggtctccatatccacggcggaggtggtgtcgtccagaatgagaatagacggcttaatggcgagggcgcgcgccagcgcgatacgctgcttctgaccgccggaaaggccggtgccgcgctcgccgatgaccgtatcaaagccttcgggcagcttatcaacgaaatcgacgcaggcgatctttgcgaagcgcttcacatcgtcctcggacatttcggggtcgccgtaggcaatgttgccgtctacggtatcggagaacaggaacacgtcctgcgtggcgatgccgacggagccgcgcagctttttgagatcatacataccgacaggcgtgccgtccacggagacggtaccgccggatacatccgaaaagcgcgggataaggctgataagcgacgttttgccgcagccggttggtcccatgatggcgatggtctcgccgggtttgatgtcaagattgatgtcgtgcagaacctctgtgccgttgcgctttaaggttacgtggtcaaacttcacggcgccctgcacgcggccttccttcttcacggcatcctgacgtgtgacgatggtggagcgcgcgtagtagagctcgacaatcttcgacgcagaggcaaagaaacgctgcaggtcgttgatgagcataccgagcgtgctcatcgggttcgtcagcgtccagcacagcgagttaaagagtgcaaacgtgccgattgaaatgcggcccatgatgaggaacgagccgccgacgagcagaacggcgatggaaagcgactgcgaaaaaccatcgatatacggcgagaatttgaaccacagcagcgacgctttgaggttcgctttgcggtaatcctcgtttttcttatcaaactgctcgatctcgtagtcttcgcgagcaaaggctttaacgacacggttgccggcgatgttctcctgcgcggcggtgttcatgcgcgaaaggcgctcgcgcaggtcgacatacagcgggtgcacctgctttgcgaaaaccttcgtcaggatgaaaataatcggcgttacggccagcatggcaagcgcgaacagccagtccacacaaaggaatgtgatggatgtggtgagaaacagcaccacgcagtcgatgatcatgcggatgacatagcacgtagtgtggcgcaccatgtcaaggtcgccggtcaggcgggtcatcagatcgccggtgcggttctttgagaagaatgagctatcctgcgcctgcatgtttgcgtacagatcgcggcgcagtttaaagagcagcttttgcgagcacgtctcgtacgtcatgaccgaaagatagttaaagcacattctgaacatcgtgaaaccgatcagaatggagacgagcacaacgagccgatgccaaagctccggcgtagtgccctgcccctcttttaccggcgtaaatacggtgtccatgatctgcgcggtcaaaaccgagttgaccagcgccatcatagaaagaaccgcggtagagcacagcgcgaaaacatatcgctttcggcagccttccaggtttttccaaacccatttcagctgaaacatagcgttccctttcctttcaatgcatatcctgctttctctgtacccttggtacagttgtacctttggtacagtccgcaccgtacgtgcggtttcctcctcaggcgcatggaatatttacgcagaaacacttcatacgcttgtttaaactattataactgtattctgttaaaatggaaccctttttcgcgattttctctccgtgagaacaaacaaactttggttgagatttttaggcaataaaacaaccccgcaaatcggatttttcatccgtttgcggggcatgctctatatgcttttattatatatagtatacgtacttttgtaatttagatttcaaagaccgtgtaggcgtactcggcttcttcgccgggctgcaaagtgcgcatgccgtgcttcttttcaaacacgtcgtcctcctgtacggcggtggcgcagccggtccacggctccagcgcaacatacgggccgtcgtttgcggcagaccagataccaagcatcgggaagccggaaaactccatcatcacaccgcggccggactggcggcttttgagtgaaacgcaggtggagttgaggttctcgaacacgagcgcgtccttatagaacaggctgtgctgcagcgggatggtatccgtatcgtcaagctcgaagttcgtcttctcaaaatcgatcaggcagctttccatatcgagcgtcgggcatttctgctcttccttttcctcgaacacgatgtcgtaatcttcaaaaatttcatcggactgaatcgggatattaaagcccgggtgaccgccgatgcagaacggcatgggcttcgtatcggcatttttaacggtaaatttcgtcgtgatgctgctgccggtgaggtaataggagaccgtcagcacaaaatcgaacgggtactgctttttcgtctcctcgttcgccgtaagctgcagggtgacgtagtcctctccctgctctgtgacagtgaatttctcgtggcgcgcgacgccgtggcgcttcatctcgtaccactcgccgttgatacatgtgcggttatcgcgcagcgcgccgacgataggaaacaaaaccggcgcgtggccgccccaatatgttttatcaccctgccaaatgtgctcaaagccgtcatcgcccataaaggagacgagctcggcgccgagcgtatcaatggcagcagattcgttttcgttttttatgtggatcagcataattcgtcctttcaaatcgcggcgcttttgcgccctgtctttttgcatgcacataacctgattttcaatcaacagtattataacaaacaaaaccgcttgaagcaagagcgaaagcctgctataattgagaaaacaccgaagaaatctcccgttttatcggtcaaaatccaccaaccggaaaggaatttacaatatgagagcagttattcagcgtataaacggtgcagagatcaccataaacggcggcgagacccgcaaagtcggcgagggcctcgttgtcttcatctgcgccatggagggtgacacggacgcgcaggcggattttctcgtgcagaaggtgtgcggcctgcgtgtatttaaggacgaaaacgacaagatgaaccgctcactcgaagacatcaagggcgatatgctcattgtctcgaacatcacgctgagcgccgatatgaagcacggccgccgcccggatttcagccgttccgcttccccgagtgaagctttgagattatataactactttgtggaacaggtgaaaaaccagcctatcggcaaagtatgcacgggtgaattcggcgcgcacatgcacgtaagtgtggaaaacgacggccccgtgaacatcatcatcgacacggaacgcatcggaaagtgacggtgtgcctatgacgcgatttttaacgctgtttgacacggttgtcaccgacccgcttgaggacatccccaccgtgaacgagcttgaaaaatggctgaaaaacgtcggcgaacaggcgttttactttctcattcgcttagccgccgccgggctgcttttgtttatcggcagcaagctcatcaaatttttgatgaaccgcttcaagcactcgaaactatatcaaaaaatggacccggggctcgcttcgttcatggcgagcggcagccgtatcgtgctgtatatcatccttattttgatgtgcttcggcgttcttggcatcgagaccgcctcattcctcgcactgttcacctcgggcggcgttgccatcggccttgcgtttcagggcgccgtgacgaaccttgcgggcggcgtgatgattttgctttttcacccgttccgcgtgggcgattacattgaaacgacggaaattgccggcacggtgaatgccatcagcgttttatacaccgtggtgctgacaccggacaacaagcgcgtgaccgtgccgaacggctcgctgacgaacgccgccatcacgaattacagcgcggagggacagcgccgtgtggagctgacattctccgtctcctacgattgtgacattgacaaggtgaagcaaattttgctttccgttgccgaaagcgacccgaaatcgctgaaagaccccaccccgctggcgcgcctgaaaacccagagcgcgagctcgctcgatttcgtcctgcgcgtttggtgcgccccggaaaattactgggacctctattttgacctcaacgaaaatgtgaaaaaggcgctggatgaagccggcatggagattccgttcccgcagatggacgtgcacatgcggtaaagcacgcacgaaaatacgaatattcccgcagcagcgccgtgaaacttccgttttcggcgctgaaattttcgtggactttcccagcagaacccccgaaggaagatttatccggtcttccttcgggggttctggatcttattctcatacttttgaaattgaatattctcttataactaaatcggtatataaatgtacaatcgaaggacgacattgattcatctattcaacattttttcattctgttaaaactaaatcgaaaagaggagaaggatcaaatccctctcctcttcttttttagttattcagcggggtaaaaagcatcttttccgagaccgcatgtggggcaaacccaatcttcggggacatcttcccatgccgtgccgggtgcaacgccgttttccggatcgccgagtgcggggtcatagacataaccgcagggacactcatatttcataagatacactcctattatttgtcaccgaaatatctcttaaggagacctgcgaacgccttgccgtggcgggcttcgtcgcgggccatttcgtggacggtgtcgtggatggcatcgagatttgcggcctttgcgcgctttgcaaggtcgaacttaccggcggttgcaccgttctcggcttcaacgcgcatctcaaggttcttcttcgtgctgtccgttacaacttcgccgagcaactctgcgaactttgcagcgtgctctgcttcttcgtaagcggccttctcccagtaaaggccgatttccgggtagccctcgcggtgtgcaactcttgccattgcgaggtacatgccgacttcgctgcactcgccctggaagtttgcacggagatcagcaaggatatcctcgctgacgccctgtgcgacgccgacaacgtgctcagccgcccaagtcatgttctcttcctgcttcgtgaacttggaagccggtgccttacatacggggcagaactccggagctgcttcgccttcaaaaacgtaaccacatacggtgcatacaaactttgccataataagatcctcctaaaaatttaaattgatttttgtttgcggcttttaagccgttttatttttgcttttttctttgcattcggcgcacacaccgccgaacagcaggtcttcttttgtgattgtaaacccgtgttccgcttccatgcgctcgagtgtttctgtgtccacaagcggttcaaagatatcgagcacgcgcccgcagcagtcgcagacgaaatggctgtgtgccgaagtatcgccgtcgaaatgctcctgcccgttgatgacgccgacgcttctcgctttgccctctgcacagaattttttaagattgcggtaaactgtgccgagacttaaatcgggatattcgggtcgcagcgcagcgtagagccactccgcagttgggtgcaccgttgtggcacgcagtgcgtcgtagagcgcctcacgctttcggctgaacttttccggcatcggcttcacctcctttaggtttgtgggatttctttctctctcacttgttggcactattatagcacgcctttttcgatttgtaaatagtaataattatcatttttattattattttgtaaacaaattgtgaacaagcctattgaaaagctgccaaaaccccgtttgcttgctttccgaaaacaagatgcaaaacggctctgcattttacccgcaaagccgttttcttagtttctatttattctcctttggtctcatcgttttccggtggaaacattttcatgaagttaagtgctgcgccgacgaggtcgtcgtttttcatcatttcgggaacatcctgcggccggaaccagatctgcgcaaacttctctatgacgggacgcaccatttctctttccgcatccgtatgcggtgtgccgacgccgcccgggttcatcatgtgtgcaatgaatgtcgcggcactctgcacgcgcgcttcaccctcggggttccacccgtcttttgtcatacagttcacgccttgctttgcggcaatttcaattttcttttccgcgcggtgttcaaaatctgcgtaatcccccgcttcgttccacgcgatttcggatacggcatacaggcgcgggaacagcaattcttcgaggtgttccggcgtttccacctgctccgaccacaatgccgcttcgtaaccgagcatattcggactgtctgcgtagctcttgcccatgacgaccggctgataatggtagaccttattcaacgaattgatgccatgcgggtaatcgaaatacaaagcggacatattggagaagatcaccttgccgccacgctcgataaatgccggcaccggcgcttcatgctgcgccgtccaatactgtatgatgttttcggtatcgacatctttggattccagaacatcgttccagcagacggcgcgcttgccgtgctttttgaggatagcgacgacacgctttgtgaagtagccctgcaaatcttcataatcggtaaggccaagcgcttccatgcgcgccttgcagtgcgggcattttttccattcggtcttcggcgcttcgtcaccgccgatgtggaagcggtcgtccgggaacagtgcgcagacttctgtcagaagcttttcgataaactcgaatgtttcgtccttaccggggcagagaattttctcaaaaatgccgccaaactggcacagctccgttttttcgccaaagcagctcaaatgcgggtatgccgcaatcatcgatctggtgtggcccggcatatcgatttccgggatgatctccatgccgcgcacgcgggcatattcgataacgctcctgatctcctcctgcgtgtaatacgtgccggtcgtttcgtgcagcagcggcagcgttttgcactcgatgcgccagccctggtcatctacaagatgccagtgcagaacattcagcttcacacgcgtcatctggtcgatgacctttttcacttcgtccgccgtaaagaaatgacgggagcagtcaagcgacaggccgcgatgaccgtagtgcggtgcgtcttcaatggtgacgattggcagcgcttcgccctctgctgtaagctccgtgacagtcgtcagcgcccatacggcgccgctttcgtccgccgcttccacggtgatgccgtcctttgtgacggtcagcttgtagccctcttttgcgatatcggcctttttcagcgtgataaacccgttttcggcggtctccacgtggccgtccagtcttgcagcaaatgcctcaaggcaccacggtgcaaaatcaccgagcgaaacggtgacggtctccggcagcttcacactgccctcctgcatgtgcaccgatccgcgcggcgcgggaataagattcaacataagcaagattcctttcttcgggcaaacgaataacacgcttgtccttttacaacttctcctcggctgcaaccgaaccgcagcctttttgttctattaagaacattataccgcaatttgcttcttttgcaagaaaatcgtgctatatttctatataattttcaaaattttaataattataagcagatatgacatagcagaattttgaatctccgtctggacttgtcgaaatagatatggtatacttcaagcgaaaagtttttgcatgacggaggagcaaacatgggcagactgatcttaattacgaatgacgacggcattgacgcaggcggcattcgccagctggcagagacagcaaaagcattcggcgaagtgtgggtcgtcgcgccggagagccagcgcagcggcaaatcgcacagcgtaacgtatttagagccgctttacgtgcgcgagcgtccgggttacatggacggcgtaaaggcatacgaatgcagcggcgtgccggtggactgtgtgcgcgtgggcatccatctgctcggtcgcaagcctgacgttgtgctttccggcatcaatagcggctacaatatttccggcgatattcagtattccggcacggcgggcgctgcgctggaggccgctttctggggaatccacgccatcgcgctttcccaggccaacctcgattatcatcccgtgaccgaccgctacttgcgtgcgctcatcggtgaatatatggataaacctctgccgcaaaacacggtttggaacatcaactttcccggctgcgcaccggaagactgcaagggcgtaaagcgcggctgcgccgtttcgcaggatgatttttacacggacagcttcaccagcaaaacactcggggacggcacggtggaatacacggtcgtgcccggcagaaactggcacggcagcgaaggcaccgaccttggcgcagtgtgcgacaactacgtcgccgtcggcaccgtgacaaatgtgcgataataaaaacatacagattttgcacctgctttttgaaatcgcaaaagcaggtgcttttctatttttgaaaaccgtgttatactgaagaaaagcaaaacattgaaaggaaacagaacatggttatattaggtgtagacctcggcaaagcgcgtacgggcgttgccgtatgcgataaaagcgagctgctcgcaagtcccgtagaggtcgtgaacgagcacaaccgcgagcgccttttggagcgtgtagcgcagcttgccaaagcgcgccgcgccgagcagatcgttgtcggtctgccgcgcaacatggatggcagcgagggcgaaagcgcgcagaacgcgcgcgctttcggtgcggagcttgcagaaaagaccgggctgcccgttgatttctccgacgaacgcggcacgactatcacggcacacggctttttaaacgaaacaaatacgcgcggtaagcgccgcaaagcaaccgtggacgccgtggcggcgacgatcattttgcaggattatcttgattatcgacgaaaccgcaaagggtaatttacacaaaaaacgcatagacaaatccgcttcgtctgtgctataataacggcgtgccgcgcagaaatgcgtttttaaggcacggaaaggaaagataactatgggttacaaaatcatcaccgattccaccatcgatatggatcataaaatgatcgaagagttgggcctcacagtggtaccgctccgctttacaatcgacggcaaaacatataaagacaaggcagatctttcggatatgccgacggaaactttctacgcaaagctccgcgagggcaaaatgtccaccacatcgcagatcaacgccgacgaattcacacgggtctttgagcctgttctgcaaggcggcgaagacgttctgtacattgcgttttccagcggtttatccggcacctgccaaagcgccttcatcgcgcgcgatgaattgaaagaaaaatatcccgaacgcaaaatttatgtgttcgattcgctctgcgcgtccctcggcgagggtttgctcgtataccacgcagccatgctgaagcgcgccggcacggacattgattcgctgtataagtggctcggtgaaaacgttttgaagctctgccactggttcacggtggacgacctcaaccacttaaagcgcggcggccgcgtttccgccacagcagcgctcgtcggcactttgctcggcgtaaaacccgttttgcatgtggatgatgagggccacctcatcccggtcagcaaggtgcgcggcagacggcagtcccttgatgcgcttgtgcagaaaatggaagagaccgccattcagcccgcagaccagaccgtgttcatcagccacggcgattgcctggcagacgccgaatacgtcgcaaaacgcgtgcgtgaaaagttcggtgtgaagaacatttatatcaacttcgtcggccctgtcatcggcgcacattccggccccggcaccgtagcactgttcttcatcggcgagcatagataaaggagcaacactatgttaaacggcaacacgatagagctcggcgtatgctattacccggagcactgggatgcttcgttctggaaagaggatatgctgcgcatgaaatcctacggcatcggtgtcatccgcgtggcggaattcgcgtggaacctctttgagccggaggaagggcgctttgacgacagcttttgggaccgctttttaaatgtggcaaaggactgcgggatgcaggtcatcttctgcacgcccaccgcgaccccgcccgcctggctgacggaaaaatacccggaagtattaaactgtgatatttacggccacccggtctaccacggtatgcgcaagcaccacaacatgacatctcccgtgtacctcgattttgtaaagaagatcgttgagcacattgcggcgcattacagcgcacatcctgcgatcatcggctggcagatcgacaatgaagtcaactgcgaaacaaacagctaccacgcgccgagcgaccacgaggcgttcagaaagtaccttaaagagaaatacggcacgctcgaaaacctgaaccgcgccatgggcacgacattctggaaccagacctacacggactgggagcaggttcacctttcgcgctacacgctcgcaaactccaacaatccgcacatgatgctggaggaaaagcgtttcatttccgaagcggccataaactacatcggcatacaggcggatattatccggaaatatcgccgtccggaacagttcatcacgacaaacgggcttttcggcgtgctcgataaccacaagctcgtcaaggaaaagctcgacttcatgacgtatgacagctacccgaacttcgcgtttgcgatggagggcagcaagctctctccgcgctccttgcgcgaccgcgaaacatcatttaaccttgcaaaaacgcgaagcgtctcaaaccgcttcggcatcatggagcagcaatccggccccggcggttggaacacccgccttctgcagcccgcgccgaagccgggtcagttaaggctgtggactttccagtctatcgcgcacggtgcagattttgtcagctacttccgctggcgtacctgcacattcggcacagaaatgtactggcacggattattgaactatgataatttcccgaatcgccgcacggaagagcttttgcgcgtaagcgaggatattcagaagattcagcgcatcgcaggcacgaagcatacggcaaagttcgcaatcctctgcgactacgacaatgcgtgggacggcatggaggacaaatggcacggacccttaaaccgggagagcaccgacgggtggttcaaagccttgcagcgcgcgcacatcccgttcgagttcgtcaacatcaacgacgagggcacgtcccagccgctcgggaacttcacggctgctgtgtacccgcacccaaccatcatgacgcccgcccgcgcggaaatattacgcgcttacgccgaaaacggcggcactcttttcttcggctgccgctccggctataaagatattgacgggcagtgccccatgatgccgatgccggggctcttagcgccgctgaccggctgcaccgtggaggatttcacgttcatcggcccggcggacgaaaaggaatacatgacgctcggcgaaaagaaaatccccgcgccgacgttcaacgatattctgcgcccggattttgaaagctgcgaggtgctggcgacgtatgacggcaactattacaacggcaagcccgcgctgaccaaaaacaccgtcggcaaaggcacggtctacgcctgtggctccgtttttgcggaggagaccgctgcggcgctcttggagctgctgccgaaagcagagctttgccctgtgacgggctggctggagctgcccgaagagatcgagctcacggtgcgtacaaacgagaaaaacggccgcagctacgcgtttttgctgaactacaccgcacagccgcaaaccgtcaccgtgcaaaagccgacgaaggagttgcttacacgcgaaacgctcgacggcacgtataccatggagccttacggcgtgcttgtgctcgataaaccacaataaacgacaaaggccgttacgataaacattttgggaggaattcatatgaaagaggaagaaaaaatctttgccgggcagtttttctgccccggtcacccggacttgaaagccatcaagctgcgctgccacaacctttgcagcgcctataatgcaacgctcgaagacgaaaccgaaaagcgtaatgcaatcgtgcaccagatcttcggcgatttcggcgagggctcgtttgtgcaggggccgatccagatccactatggcacgcacacgcacatcggcaagagctttttcggcaacttcaacctgaccattcaggatgacgcgcccgtgaccatcggtgaccgctgcaacttcggcccgaacgtgactatcgtcacgccgatgcacccgatcatcgcagaggaacgccgcgtgctgaaaacaaaggacggccgtgaaattcgcgtttgctacgcaaaacccgtcaccatcggcaacgattgctggttcggcgcaaacgtcgtcgtatgcccgggcgtgaccatcggcgataactgtgtcatcggtgcaggcagcgtggtaacgaaggacattccgtcaaacagcgtggccgtcggcaacccctgccgtgtacagcgcaccattacggaagcagacagcatgaaatatcatccggaacgcttcggcgaggaagaattcgtgcttgacgaataaactgagcttataatacgcaaaaacagctccgagcttttcgcccggagctgttctcaattcatcttaattcaaattagaagtaaacgacctgattcttctctgcgctctcaaagatcgcttccatcagcttcatcagctggcgctgctggtcgtgcgtgacgatctgctctgcttcgccgttgacaactgctgcaatattgcgataataatcgtgaatgtcgcagtcgattctcggcagcggaagctcgctgatcgtttccggcgttctcggcgccatggtcttcgtgaggcctgctgcggtgacgatcggcactgcatcgtgctcttcgtccgccgttgcgatgacgatcttgccgttgacctggaagtcatcgatgacagccgtgccgttcagaccttcgacataccaacgcggcaggttgatgaagttgctcgtgccgacttctacggtgaacacgagatcgttatcgaacttgaacgtagcggtgaagccgtcgtccacttcttcgttcgttacgttggacagcgttgcgtaaacggaaaccggcattttgcccatcatcatgttcatctggtcaaggaggtgcacgccccagtcaagaaccatgccgccgccctgtgccttcgtgtttctccagtcgcccgggataccgcgggaaccgtgaacacgggactgaatggcgaaaacacgaccgagctgaccggactttgcaatcttctccgcaacgcggaaatcctcgtcccaacggcggttctgatgaaccgtgaagacggagcccgtgcgcttggaggctgcgatcatctcttcgagatcagcggtgcaaagcgtgaccggcttctcgctgatggcaaccttgcccgcttccataacctgaatgcaaaccttcttgtgctgatcgttcgggattgcgaccgttacaacatcaacggtcttgtcggcaagcagctcctcaaaagagctgtatgcgtgaataccgttttcctcagcaaccttgttgcgctccggcttaatatcgtatacgcctgcaagctctacaacacccgggatttcctgtaatctcttcgtgtgccagccgcccatgccgccatagcccacgacggctactcttactactttagacataataaattggactcctctcgatttaaaataaataacctgtctgcgctctctaaactacgcgctatacaccttattatactaaaagacgcgcaagtttcaaggtgtttttatagatttttgcatcttgtccgcgatttcggcgaaagatacaaagaccgcctgtgcaaaactgtgtataaatcccacgtttgattggaaatcggcgcaaaaggaatttagccccttgagttttttcacccgatgtgctacgatgaacctgaataatgcgtgaatacaccggaaaggttgattatatctatgaaaatgtcatttcgctggtatggcccggacgaccccgtgaccctccaaaatattcgtcagattccgaacatgcaggccatcgtcaccgctgtatacgacgtgcccgtcggtgaagtttggagccgcaagagcattgccgcgctgaaaaaacaagtggaggataacggcctgcaatttgaggtcattgaaagtgtgccggtgcacgaggacatcaaactcggcaaacccacgcgcgaccgctatatcgaaaattactgcgagaacatccgccgccttgccgaggccggcattcgctgcatctgctacaatttcatgccggtgtttgactggacgcgcacgcagcttgaccaccgcctgccggacggctctacaagccttgtctactataaggagcaagtggatgccgtggacccgctgaaaagcgacagcgacctcacgctgcccggctgggacgcaagctacacgcgcgaggagctgagggccgtcgtggcggaatacaacaaaatgaccgagaaagacctttgggcaaacctcacttattttcttgagcgcatcattcccgtcgctgcggaatgtgacgtgaacatggccatccacgaggacgacccgtgctggagcattttcggactgccacgcattatcacgtgcgaaaagaatctcgaccgcttcctgaaaatcgtcgatgacccgcacaacggcatcacgctgtgtaccggctcgctcggatgcagcgccgaaaacgatgtggtgcacatggcggcaaaatacgccgcgatgggccgcatccatttcgttcatgcccgcaacgtcgccgtgctggaaaacggttttgaggagcgcgcacactactccgcatgcggctcgctcgatatgtatgccattttgaacgcgctctacaaaaacggtttcaacggttacatccgcccggaccacggcagaatgatctggggcgagaccggccgcgccggctatggcctttacgaccgtgccctcggcgccgcgtacttaaatggcctgtgggaagccattacaaagcgcaactccaatatggagcgataaattaaagccaacaaaaaaaccgatgcagtcgaaactctgcatcggttttttaatagataccgtaagcttcaccttctgttttaccgcagcgaacacaggtcttggggtagttgatcgtagccgctttccaatcatgcccaagcggctcgccttccgtcataccgcaatatacacaggttttcggctcggtgcaggtggcttccttccatttatgcgcacaggtgcaggtcgtaagaagaaagcataccaacagcatagcaaaaattactcgtccccagcgtttaagcattgcttttctctcctgtctatcctcttttcccaattttagatgaaatatatctaaaagtcaatagataaaatccgtctacatatactttgagtggataccactcaaagcaggtgaaaaaattgacggaaaacagaatacgcgatctgcgggaggactctgatttaacgcagcagcaagtcgcagatgcaatcggcattacacagcgcaaatacagttatatcgaaacaggccagcagcagcttacggacgacattctaattaaactcgcaaacttctataacgtgagcattgattatctcttgcggcagacggcaaaccccaaacgaaatctctgacgtaaaattcccgaaaagtcgtttgttaggcttgacaattattcaaaaaaagggtaactttatagataagaacgccgacaaaaatgcggcgttttgtttccgtacgcaaaaacgcaaaagcactttgcgattatttgcaaatacactgacaaaaatactaaaacaaaggagtggagaaaatggacgctggcagtagtggcggtgcggttcctcgagaacggatgcagccgcccgcagaaaaacaggcgattttctccgcttgttttttgcgtaaccttacatttgtaaacggctgagttcaaaccgtatcgtccgattgccgatttttgcacgattgcagagaaaggacggacgaactatgttggatatattggacaaaattttagagctgctggagaataaagatttcccccagttgggcaatcttctgaaagacatgaacccggcagacgtggcagaactttttgaagacctgccgcgtgaaaagatggcgcttgtgtttcgcctgctcccaaaagagcttgcagcggacgcgttcgcttatatgaacccggacgaacagacggtgcttgttgaagcattcagtgataaagagctgcacgacgtcgtgaacgagctgtatgtggacgacgctgcagacatgattgaagaaatgcccgcaaacctcgtcaagcgcattctgcgacacacggacgccgaaacgcgcgtactcattaaccagattttaaattaccccaaagacagcgcgggctccatcatgacgatggaatacgtcgatttgaagcgtggcatgacggtggaggaggcgtttgaccgcatccgtgccatcggcgtggaaaaagagacggtgtacacctgctatgtcacggacagccgccgcaagctgaaaggcattgtgaccgtgaaagacctgctgcttgccccgaaaaacgagctgatccgcaatatcatggaaacgaacattatttacgtttccacccataccgataaagaagaagtggcctccctgttcggcaagtacgattttcttgccgtgccggtcgtcgataacgaagagcgccttgtgggcattgtcaccgttgacgacgcgatcgatgttattcaggatgaggcaacggaagatatcgaaatgatggcggctatcacgccgaccgataagccgtacatgaagacgggcgtttttgccacatggaaaaaacgtatcccgtggcttttgctcctcatgatctccgctacatttacgggcagcatcatcacctcgtttgaagatgcgctttccgcttccattgtgctgacgggttttatccccatgctgatggacacgggcggcaacgcgggcagtcaggcttcggtctccatcatccgcggtctttccctcggcgagatcgaatataaagacgttgggcgtatcctctggaaggaggcgcgcgtggcttttttgtgcggtgtttcgcttgccgccgcaaactttgtcaaattgctgctcatcgatcgtgtgaccattccggtcgccatcgttgtgtgcagcacgcttgttgtaacggtgctcgccgcaaaactcgtcggctgctcgctgccggtgcttgcaaagcgcatcggttttgacccggccgtcatggccagtcctttcatcacgaccattgtagacgcgctttccttgctgatctacttccgcattgcgtgcgcggtgctgcatatcggttaactttatccatcagaggaggctgctgttatgaaccaaaaagatattgaaacacttgcaatcgcactgccggaagacattttaaaagcaaaatggtgcggcgattttgaccgcgcgttccacctgatcgacctataccttgcaaacgagaaagtcccggcatttatgaaaacacgccttgcactggagcgtgaggtcttgaaagcactgccgacgggctacacatacagcgaagaagacgctttggcgttcgtgcagaaggaaattccggatttcacgaaggcagagcttgacgcattgcgtgaccgcggtgctatcgactggatctacatcaacggcaaaacgacgtattcccgcacgttctacgatacgcttttgggcgtttacccggatatcgccacgcgtgcaggcaagccgccgaaggacaaaagtgatcgtgtggaatttctgcgccaaaatgtacgcgacatgaaaaaagacggtgacgcgctgtggagcattcagctgcgcgcccagttccgtctgcatgacgatgttttccgtcccggcgaagaactgaccgtgcatcttcccgtaccgaagaacgcgatgaacatgcgcgacattgagatccttgcgacctcccaccccatttataagcttgcagatgaaaatgcacccgcgcgcacggtctcgttccgcggcaaattcgagaaaaacgaaaccttctgggtcgaatacaaatatctttcctatgtgaaatacaacaacctcgaatccgcacaggtcagtgcagagcagccgacgttcgacaccgaggagctttacccgcacattcgcttcacgccgctcatccgtgcgctttgcaaagagctttccggcgatgagaagaacccgcttctgctcgcacgcagattttacgactactgcacgaaggtcggtacatattcgtatgtgcgcgaatacttcgcgctgccgggcagcattccggattattacggcgcggggctgcacggggactgcggcgtgcaggcgctgctgttcatcacgctgtgccgctgcgcaggtattcctgcccgttggcagagcggcctgttcgtcacgccggacgacaccggctgccacgactgggcgcagttctacattgctccctacggctggctgtttgcagacccgtccttcggcggcagtgcgcaccgcatgggcgacagcgagcgcaacgacttctacttcggcaatctcgacccgttccgcatggcggcaaacagcgagcttcaggcggattttgacccgccaaagacacagctgcgcatcgacccgttcgacaaccagcgcggcgaagccgaatacgcagacgtcggcatccgctggatggacaaggagtgcgactggaagaccatcgaaatgaagaagctctcttaatttaaaacgttaaatgcccgccgtgcttttgcacgcgcgggtatttttgaccgtaaaggaacagatctatggaaacgaaactcgatattctgcggcgctatttcggttacacgtcctttcgcctcggtcaggaggaaattgtagatgcactgctcacgggccgcgatgcgctgtgcgtcatgccgacgggcgcaggcaaatccgtgtgctatcaggtgccggcactcctgctgccgggcatcacgcttgtcatctccccgctcatttcgctgatgaaagatcaggtagaatcgctgacgcaggcgggcgtgcacgcggcatacctcaacagctcgctcaccccggcacagtacagccgcgcactacacaatttatccgagggattgtataagctcgtctacgtcgcgccggagcgcctttcgaccgagaacttccgcacggccgtagagaacctcaatatttctctcatcgccgtggatgaagcgcactgcgtctctcagtgggggcaggacttccgcccggactatttaaagattgcggaatttgccgaaagtttgaaaaatcgcccgacgatcggcgcattcaccgccacggcaacaaaagccgtgcgcaaggacattgcggagcacctgcacctcattgaccccgtgcgtatcacgacgggctttgaccgcccgaacttatatttcggcgtgcagatgccgcacagtaaggcgctggcgcttttgaagctcattgaggaacgcccgggcaaatgcggcattgtgtactgctccacgcgccgcaccgtggaagaagtggacgcgcttttaaacgacaagggcatcccttccacgcgctaccacgccggtctgccggaggaagaacgcaggcggaatcaggacgatttcgtctatgaccgcaagcccattatggtcgcgacgaacgcgttcggcatgggcatcgataaatccaacgtgtcgttcgtcatccactacaacatgccgaaaaacctcgagagctattatcaggaagccgggcgtgccggacgcgacggcagtcccgccgagtgtattttgctttacagcccgcaggacgtgcgcacgaaccgctatttaatcgaaaacagcgacccgaaccccgacctcgactttgaaacgcaggaaaagctcatccagcgcgaatacgaccgtctgcgaaaaatgacatattactgcacgacggctgattgcctgcgcgcattcatcttaaaatacttcggcgagcccgccgaggaatactgcggcaattgctccagctgcgcgggcggctccattttggtagaggccaccgtggaagcacagcaggtgctctcctgcgtggcgcgcaccgggcagcggctcggcatcagcatgatctgcgacattctgcgcggcagcgaaaatgagcgtgttttgcaaatgaatctgcaaacacagtccacctacgggctcatgcgcgaaaagccgatttttgaaattaagcgtatcatcgacgcacttttgatgcaggaattgctcatccagaccgacgggcaatatccggttttaaagctgacgcagaacgcgcggccggttttgcttggggaaaaaagctttgaaatgcgtattcccgtgccgcaggaaaaagcgaagaagccggacaaggccgcaggcgatgccgacccggagcttttcgcacggctgaaaaagctgcgtgccgcgcttgccgcaaaagcaagtgtgccggcctacgtcgttttcaccgacgccactttgcgcgatatgtgcgccaaaatgccgacggacgagcaggagcttttgcaggtctccggcgtgggcgagcgcaaggcgcatcgctacggcaaggcctttttggaagagatcaaccgcaaagcggaggaagaataaatggaacaagcaaagcacaaattcaatcttgtcgaccacatcgaggtgcgcggtgcgcgcgtgcacaacctcaaaaacattgacatccatgtgccgctgcataaaatcgttggcgtagcgggtgtttcgggctccggcaaatcgtcgctcgcgctcggtgttttgtatgcagagggctcgcggcggtatttggagtcgctttccacctacacgcgccgccgtatgacgcaggcggcacaggcgcaggtggacgaagttctatatgtcccggccgcgctcgcactgcaccagcgccccaatgtcccgggcatccgcagcacattcggcacgggcacggagttactcaacagcctgcgcctgatgtactcgcgcctcgcaagccaccgctgcccgaacggacactacattcagccgacattggccgtcgcggcgggtcagccgtgcgtgtgccccgtttgcggtgcggaatttttcgcgccgtccgcggaggaactcgcgttcaacagccaaggcgcgtgccgcaaatgtgacggcaccggcatcgtgcgcattgtggacgaaagcacccttgtaccggacgacaccctcacgattgacgaaggcgccgtgcgcccgtggcagacgctgatgtggtctttgatgaaggacatcgcccgcgacctcggcgtgcgcaccgatgtgccgttccgcgagctgacggaaaaagaaaaggacatcgtgtttcacggccctgccattaaaaagcacatgatctaccagaataaaacgagtggcgcagcaggcgaaatggatttcacctacttcaacgccgtgtataccgtggaaaacgcgctctccaaagtcaaagatgaaaacggcatgaagcgcgtggaaaagtttctcaagaccgaaccgtgcccggactgcggcggctcacggctatcggagaaagctcgcgctccgaaacttcgcggcatttctttagatgaagtctgccgtatgacgctcgccggcctcaccgattgggtcgcggacgtgccgggttcgctgcccgaagaaatgcgtcccatggcgcagagcatctgcgattcgtttacattgaatgccaagcgccttttggagttagggctcggctacctgacgctggaccgcgccgcctccacgctttccacaggcgagcggcagcgcatgcagcttgcccgtgccgtacgcaaccgcaccaccggcgttttatatgtgctcgatgagccttccatcggcttgcacccggcgaacatcgtcggcctcaccggtgtgatgcacgatctcatcgacgacggcaactccgttctgctcgtcgaccacgacacgcagattttgagcgaggccgattggctcattgaaatgggcccggaagccggtgcaaaaggcggccatgtcatcgcggagggcacaacagacgacattaagataaacgaaaactcgcagattggcccgtttttggcgggaaagcagggcatctcgcgacagaaagcacccgaaagcgagcttttccaaaacggcgctatccacctttccaccgaccgcatccatacggtgaagccgctcgaagtagatattccgaaaagccgcctgaccgttgttacgggcgtttccggctccggcaaaacgacgctcattctggaaagccttatcccggcgctttcggcgcatattcgtggtgaaaagctgccggcgcacgtgaagtcggtcagcgccgagggcatcgaccaagtgaagctcatcgacgctacgcctatcggtatcaacgtgcgctccaccgttgcgacatacgccaatgtgcacgatgagctgcgtaaaattttcgcccgcacgccggacgccaaaaaaagcaaatacaaagccggcgacttctcctacaacaccggcaagctgcgctgccccacctgcgacggtaccggcagtatcagcctggacgtgcagtttttgcccgatgtgaatatcccctgcccggactgccgcggcagccgttacggcaaagacgcatcgaagatccgctgcgtgacgaaaagcggcgaagcgtacaccctgcccgaaatcatggacatggacgtgcgcacggcgctttcagcctgcaaggactggaagctcgtctcgcagagattaaatgtcttaaacagcctcggcctcggctacctcacgctcggtgaggaaacgcccggactttcgggcggcgaagcgcagcgcttaaagcttgcgagtgaaatgggcaaggcacagagcggctccgtgttcgtgttcgacgagccgaccatcggcctgcacccgctcgatgtgcagacactgctcaccgtgttccaaacgctcatcgaaagcggcgcgaccgtcatcgttattgagcacgacctcgacgtcatccgcagcgctgattacattctcgacatgggccccggcggcggtgaagcgggcggtcggcttgtcgcctgcggcactccggaacagatcaaaaacgccgcgggcagcgtgaccggaaaatttatttaaaccaagcgcgtgtacccacaactccgtgtgatgcacgcgccttttttattcgtcgaatgcttttcgcagcttttgcagcgcttttttctcaaggcgcgaaacatagctgcgggaaatgttcagcttttttgcgacttctctctgcacgagcggtcgttggcccgtaagcccgtaacgcagcaaaacgatctcgcgctcgcgcggcgaaagacgggtcttcaccgcgtcgtacaactgccgcaccttcatgcgcaagtcaatgtcctccaaaatgtggtcgtccgtcgcgatggtgtcgagcagcgtcagcgtgttgccgtccttgtcggtatcgatggggtcattcagcgatacgtcctgcgctgtctttttcgcgctgcggaagaacatcagaatctcattttcaatgcaccgcgaagcgtagctcgaaagccgaatgccctttgtcgggtcgaagctgtccacagccttgatgagccccaccgtgccaatggaaacgaggtcatcgcggtcattttcatcggcatagtatttcttcgcaatgtgcgccacaagccgtaaattgtgttcgatgagtttttgccgcgcgtggtggtcgcccgccgccatttgctccagatattttttctcctccgccgcagtcagcgcctttggaaacgacccggcgcttgtgatgtgcagaaagaaaaacaaaatcgacgataaatactccaaaagcccccaaagcatacccactccccctttagagaatggtatgcttcaggggcttttcttatgtcttttgctatatattatttgtggacaacatactggttcgggtcgccaagcagttccttcggcaagtggcttttatcgctgaggcgcaccgtttccacgctgccgtctttgccgatataaaattccgaaaccgaggtgttgccgccgatacgaatatcactcaaacgttcaatatcgtgctccaaaatctcacacgccatgcagcgcaacaaaaaaccgtgcgacgtgatgaccgctgttttgcccatgcaatccgctttcacgcgtgcaagcgctttttttgcgcggtcataaacttccgctgtcgtctctccctccggaaaaatgcagttttgcggggaattctgccatttttcggcaaataccggataatccgcgaacgctttgtcaagcttcatgccggacagcgcgccaacatccacttccatcagctccggcagttttatgatgggcaaactgtggtacaaattcaccgcttccgccgttttatacgcgcgctttaacgggctcgaatacacagcatcgatcgggatgttccgaaaccgcagcgccaaaagcgccaactgcttttctcctgtagcgctgatatcgaggtcaagctgaccctgaaaaatattctcgtggttgccgaggctttcgcagtggcgcacaagatataagtgtaatttttccatatcatttaccacggacgcatcgcaccggtcaattcggaaagggtcttcacgccgtttttatccatgtaattcgtaagcccttcggtaatcttcacaggcgcatacgggtctgtaaacagcacggtgccgatctgcagcgccgtcgcacctgcaagcagcatttccacggcgtcctgccatgtgctgatgccgccgagaccgacgatcggaattttcaccttctgatacgtctgccacaccatgcgcaccgcaatgggcaaaagcgccgggccggagaagccgcctgtgttgttgtgaatgatcggacgcttcgtgttgatgtcgatacgcatgccggtcagcgtgttgatcatggagacggcatccgcaccggcgctttccgccgcgagcgcgatctcggaaatatccgtcacattcggggaaagcttcaccatcagcggctttttgcaatgcgcgcgcaccgctttcgtgatgtcttcaacgcctgcgcagctcgtgccgaactgtacgccgccctgcttcacgttcgggcaggaaatgttcatttcgatcatgtcgatgtcggtgtcattcagtttttccgccatggcgcagtaatcctccggcgtgttgccggcaatgttcgcaatgatggtcacgccttgctcgcgcagccacgggagatctttttcgatgaagtgatcgacacccggattttgcagacccacggcattcagcataccgccgggggcttccgcaatgcgcggcgcaggattgcccggtcgcgcctttaacgtgatgcccttagaagaaataccgccgagtgcggagagcgggtaaaactctgcatattcgcgaccgaaaccgaacgtgccggacgccgcaatgagcgggttatggaactccacacccgcaaccgaaacctttaaatcagccatcagaataccaccctttccgccgggaacaccgggccgtccttacagacatggcccatatacgtttcaccgttttcgtcgtaaagctccaccgcgcaaccgaggcacgcaccgatgccgcacgccatgcgctcctcaagggaaatttcgcacggaatgttgtgcgcttttgcaaactccgtcacggcgcgcagcatgaccttcggaccgcaggcaaaaattttatcggggtgcacatcctgaattaaatcgatgacaaggccgtggtggccgtagctgccgtcatccgtcgcaatgcgcaggtcgcagcctgccgcacggaagtcgccttccaaaatcacgaaatccttattgcggaaaccgaccgccaccgtggcgtttttgccgcattgccttgctgcgccgaaaagcggaggcacaccgataccgccgccgatgaacaaattgtgcgcgttcgggtcgaacgtaaagccgtggccgaggggcgccaaaatatccatcttgtcgccgacctcaaacttcgagagctgctctgtacccgcgccgcgaatctggaacacaaagcgcagcgtgccgtttttcttatcgatgtcacaaatggaaatcgggcggcgcagcgttttaccgggcacgtaaatgtgtgcaaactgtccgggctgcgccgcttctgccagtttcggcgctaagaccgtataatcaaaggtgttctctgcggtctgcgcgcggcacagcacctcgcagagctgaacgtcatatttcatagcttgtcctttccgagcgttactcatccgttcgcgcgaattttgccgatgcgtgcgcagatctcgtcgcgcatgcgaatggcttcgcgtcttgccgcctgtgcataatcatgctcgtcgcacttttccttctgccatgcgcacataatgccgcgagaggaattgatgatggcgccgagaccgttcttgtcaaacgccggggcaacgtcgtccgcgccgccgccctgtgcgccgtaaccgggcacgaggaagaacgtgtgcggcgctttctcgcgcatttcgccgagctgtgccgggtacgttgcgccgacgaccgcgccgacgccggagtagccgtatttacccataacgctttccccccagtgctcgcagaattcgcccatggtttcgtaaacggtcttgccgctttccattttctgatcctgcaattcgccggaggacgggttggaggtcttcacgagcacgaaaatacccttatcttccgcttcgcaaacgccgagcagcggcttgatgccgtccgtgccgaggtacccattcacggtcagcgcgtccgcaccgaaggcttccgttttctcgccgaacacatccgttttgccgaggtgcgccgtggcgtaggcttccatcgtggtaccgatgtcgttgcgcttgccgtccgtgatgacgaacatgccctttgcgcgcgcgtaagcgacggtctccgcaagggttctcacgccctgccagccgtacatttcatagtacgccgcctgcggctttacggccgggacaatatcgcacagcgcgtcgatgaggcccttgttgtattcgagcagtgcggcggccgcagcctccagcgttttgccatactttgcgacggcaccgtccagaatataggacggaatgtacgcgagcttcgggtcaagacctgcaacggtcggattctgggtttccacgattttttcaatcatacggtcaaaagacatagtaatccctctctcatttcaaatctataatttcaaatttctcaaacttttacagttcattaaatacaactctgccgccgcagacggtcgcctttacgcggcccgtgagcgtcatgcccttaaacggcgtgttgcggcttttgccgtgcagcttttcggggtccacaacccacgcttcgtgctcgtcaatcagcgcaatatcggccacttcgcccgcaccgatggcgccggcttcaatgccgagcagctccgccgggcgcacgctcatcttttcgatgagctctgtaaacgtcaaaacgccagtctttacaagcgcggtatatgccgccgcaaacgacgtttccataccgatggagccgttcggcgcgtgcagaaaatcggttttttctgcacgcgtgtgcggcgcgtggtcggtcgcgatgacgtcgatcgtgccgtcctttacggcctcgatcatcgcaaggcggtccttctcgctgcgcagcggcgggttcatgcggtaatccgcgtcgtgcttttcgagcgcttcgtcaatcaaaagcaagtagtgcggtgcggtctccgccgtcacctttacgccgcgggctttggcatcacggatgagcgccgcagaggttgccgtgctgacatggcagatgtgcaccggcacgtcatacgccgcagccgccgcaatttcgcgcgccgtgccgcagtcctccgccgccgcaggtacgccgggcagattgagcttttcggaaacttctccctcatgcatgacccactttttcgcgaggaacaaatcttcgcagtgcgccgtcacacgcatatggagcttcggcgcttcgcacaatgcctttacaaggcaggcggtatcgataaccgggcgaccgtcgtcgctcaaagcaatggcgccggcatcgtgcagcgcttctaagtcgcacagctcttcgcctttcagtccctttgtaatcgccgccgcaacataaacatgcgcatcggcggtctttgctttgtccaaaatatagcgcacagtctcgggcgtatcaaccgccggcttcgtgttcggcatacacaaaaggctcgtcacgccgcccgccgcagccgcacggcagcccgtgtaaatatcttccttatcggtaaagccagggtcacgcagatgcacatgcatatccacaaagcccggcaccgccgttaaaccttttgcttcaatgacttcggcatccgcatcgtacaggttttcggaaaccgcgctgatgcggtccccggagatcaaaatattgccgatataatcctcgccgcgcgcggggttcaaaatgcgcgcaccgcggatcagcaagcgcttttgctcttgttccattcgtctcattcctttcgggtaaacagcaggaatttcaggatagccagaaattctcggcacaggtttttcggcagacttttcaaattggtattcgcatgcagcggatacggcgtaagtcccaacatttttgccatgcggcaggcgcgccactggtggtaactttgcgttgcaagcaaaacggtatcggaaaagccattttcgcgcagaatatcccgcgcaaaacgcaggttttcaagtgtcgttttggagtttacttccgcaaagatgcgcttcggcgcaaccccgaacttaatcagcgcttcctttgcggcttcgccctcgctttgcggctcgtccttgccctgcccgccggtcgtgatgcaaacggctttcggataggcttttagatacgatgctgcagtatccacacgatattgaaacgcgcgactaaggtgcgcggggcaggttttcgatgcccccaccacccgtgcgccaagcacaatgacaacgccgttttcgggcaattttcttcttcggtgcatagtttctccttgtcgcatactgaatagccaaaacacctcataataattataaagaattcccccgaaaaccgcaagggcttcgggggaaaaagtttacatggtatgaaatctcatttaggccgcaggctctgcgattgtttcgccgccgtttgtgccgggatccggctctgcgggggtctcgtcgccgccggagggttcggagggaacttcttcgccgccggaaggctcagacggtgtctcgtcaccgcccgcaggttcagacgacgtttcgccgccggagggttcggagggcacagaaggctcttcgtagccggaattatcggagccgcccgaatagctgtaatcgttgctgtcggagtagctgtagttgttgctggagctgctctgggtaccgcttccgctgctcgtgtacgaggctgcggggtcgcccggcatagaagcatatcttgtgcggtccgcatccgtaatgttcgtatcggtcttcgagagcgttttgccgtccttaacagcctgcatcagctcttttgccttatttacggtgttataatccggacgcatgacgtaggcgtaatcgctcatggaatacgggatctgcgaatcgcccgtgccggtcacgctgcattggacaacgttccaagagccgttatcggaaagctgacggcgcacgagcgccgcgatgtcgtcatacggcacatccatctcgaagcagtccttgatgctgtccataatggagttgtagcgcaccagaatatccggggaaagtgccttatcgatgatggcggaaataaccttcagctggtttttaccgcgctgaatatcgccatccacaaacgaatagcgctcgcgggcaaaagtcagcgccattttgccgtccatctgcaccttgcccaccgggtacgtgtagttgccctttgtaaacgcaacatcgttatcgaccgtaatgccgccgagcgcatccacaatgccggtaaagccggagaaattgaggcggaagtagtaatcgatatccgtatcatacagcatttcgagcgtgcctatggaaacgttcacgccgtaaatacccgcatgtgtcagcttatccgggataccgcccgaaacaggcagcggcacatagtagtcgcgtggggtcgtcacaagcagaatctggcgcgtttccgtattgattgtcgccaaaatgtttacatcgctgcggccgaccgtgttaaggccctggcgcgtatcgctgccgctgatatacagggtgtaaatacgattttccgcatcgctgttgccggtgctctgcgtcttttccgcttcgctctgtaccgccgtttccacgtgcagcacttcaagctcgcgaattttgctttctacatcggcgtatttatcgagctccgtcacaacgtcgaggtatgcagtatttaggatgatcgcaccgcattctttgttgagcaggccgtcgatgagctgtgtgatgccggcatacgtcttcgtcgtcactgcactgccaaagcgctccgtgatctggctgacggcggaatcggtgctttcgcggtcaagcgattccaaaatgccgaacgtatagccctttgtgtcttccaacgcggaagccgggtcatccgtgcgcacatagaccgctacgggcgtatattccgtgcgcaccgtgccaatctccgtcagcgtgccggtcgcgaccgaaatgtagttgctcgcaagaccaagcaccagcgccagtaccagagaaagcgacgcgccgcagatgaactgacctttatttcggatgctgcgcaccaacaaaacagcagaagccaccaaaaggacaagtgcaataccgccaaggatcagcagcttcgtcggcaccatcttgctttgcagaaggatcaccataaacacggcaaacactgccaccaaaaggacagagatcacaatgcccgggatccgttccttccatttgctcatatcgtgtactcctttgattttgacgtttcgggaaaattcggcgcgccgcgcattccgcggcagtgccttatccgagttattatatcgcttttacccgttgtgcgtcaacggatttgaacaaaaagccgtcaaaatcagtaaaacgccgacaaaacatctgcatttttagctacaaggcactattttgacgaagccgtccgcactgcaaaaagctgctgcgggtgcacagccgcgtaaaaatcattcaggataaatccggcaaaatccgtcccgctctgcgtgagcgcgtcggcgcagtcgtttactataccggccggagtgtagtcctgtcgcacaacgagcaccgaaagatccgaaagcgcactgagcgcctcggcatcggcggaaagcagcatcggtggggagtcgagcaaaacgtagtcaaagcgttcgtccgcccgcgccgccaaaagcagctttttcagtttttcactgtgcaaaaggcgctccgggtgcgcggcgggcgcggtaaggccgagcgaaatgccgtatttttccgaaaaaataagcggcggctccgcggctttctctgcctgcaaatactgcccgatcccgtttttagccgccgcccgcaggccgaaaattttgtgcaatgccggctttcttaaatcgagatccaacagcagcacatgccgcccgcgcatggaaagcgccagcgccaaattcaccgctacgcttgattttccttcgttttctcccgcgcccgtgagcagcagcacttttttgccgtcccgccgcatgcggtgctccaacgccgcgcagagatcctgatacgcttccgtgtaggtgtaccgcacaaaagggtctgtcagcagcgccgcagccttgcgtcccgcaccgcggctcttttttacgaacagccgcttttccttgcgctcgtgcccgatggtgcccagcacgcgcccatccagcttatgccgcgcggcctgcggagtttgcaccgtatcgcgccgcagaaacaaaaccgatacaatcagcgatgcagccagcatcgcacccacacaggcccgcatgcggtacggctttaagtccaccgggtttgaaggggcaagcggcacctgggggtcgcggatgacgcgcagctcggcgtttgagaacagcttgtccgtcaggtctgcgtggttttccagcacatttttcagcgataaaaacgattcgcgcgggttctccgccgtcacctgcacattgatgaggttcgtctccggcaaaacggaagccacaacgtcgcactgcgcagcctcgcggaacgtatcgctttgaaacacactcgcaaacacctgcgccatgcgggccgtgagatctaaagaggtatacgcgctcgtgccgccctttacatttaccgccacggttgccgaagcggtatacacagggtgatacgtaaaaagatgatatccctccacgcacagccatgccgtgagcaccgccaaaatcagcacccacaggttatagagcagcccgcgcagcacgcacacggggtgcaggtcaccccaaaaaaagcgttcgtccttcacgttttcccctcctccacgatcaccgtcaggcaggcgcgcacggtctctgtttccgtctctgccgcatactgcaccgggtaacagccgggctttgcggtatctatttgcgtcactgtctgctttttcacctttaccaccgtgcctgcatggtcaaacacgccctccaaatagtccttcggctcaaacttttcgcctgccttcacatacacgattccctgcttcaggcgaatttcaagactgctgtcgctcagctgcatataaagctgcatctcgctctgtccgccgtaggaattcgtcacggataccggcagcgtgtacatgtcgttttccacaaaagtaatatcttcggtgaacaatcgaatacggtcggaaacgtcgccgtccattacgtcctccgctgtgatctgcgccaaaagtgcgggcatctcgcccgtgcggtaggtcgatggtacattcagcgcaaagcgcggcgggttgtaatccgtataccgcaccgtgcgcgtgagcgtcgccgcgtggcagtccgcatcgaacaccacgtattttatgcgccgacggtcgccgtccaacaacgcggacatacccgcaatgcagatctcatccgtcaggtctccgtcatgcgcgtcttcggcatgcagccccgcgcaatacgcgctttccggcgcggtaacgctgagcgcaagttcgccgtccgtttcgtccgtcaaaacgggcatggatgtatcctgcgcctgtacgcgcggcacggcaacccacaggtaaaacgtcagtgcggcgcagaacagcactgccattaccatttgaaataccctcatgcgattctctcctttccggcttcgccgctcagaattctgcgtgggttttcatgcagcatccgctcggcatacgcagcaccgaagtgctccgcaagccacgcgttcacgtcctccaaaatcggtctgcggtacacggtcccgtgcccgtcgctcgccacgcaaaaagccagatcgcgctccagcagcacccgcgcggtctctgccgccctgcgcccgaaagcgccgaaaataccgctgcgcgtcacctgcagcacggccccccgctctgtccacagctccgcgcgccaaggttcgttttgcaaaatgacgtaccgctccgggtgtgcgatgagcggcacatacccgtattttcgtatatgctcagtcgccgccgcgcaccattccgacgagtcgagcgggtcaaactccaccaaaaggaaccgactttcgccgagcggctgcacatcgccgctttgcaggcggtcaaacagcgtgccgtccgccatcatttccatgccgaaaaagagctttacgggcagactttcccgcgcagccgccgcttttagacgctcaaattttcccaaataccgcgtcttcgtcacccacgccccgtgcggcgtgacggctaaagctttcgtgccatgctctgatgccatacgcagcatcataagagacgcttcaagcgtttccgcgccgtcatccacgccgggcagcacatgcgcgtgcaggtcgatatagctcataccgtctcctcccgtgtgcggtgcgcgctgtaatggccgtagccgtaatgcccgtagcgaccgtattttccgtatccgtagccataaccgtacttgccgtaaccgtagccggaaagccccgcctgtacgccgttcagcacgcagcccgcaacggtcacatcgcagcttaggagcttttcgatgcccgctttgatcttcgtccgcgatgcgcgatcctgctcgatgacgtacaccgccgcatcgcagctttccgccgcgggcagaatctccgcaaagcgcgcgctttccggggcaatgagcaaaacgcagtccgcgtcttcgcgcagagaagcaatcgcgccgcgcagattttcgccaacagcgagcacctcgcgcggtgaaagcccgcggctgcacgcggcgtagcgatacggctctgcaccgcgccgatgcagcacctcctgtgccgggcagtgcccaaaaagacacgcttccagccccggcaaaagtttatccatgccgcgctttaaatctaaatcgatcagtaccacgcttttgcccatttcgcccagcacatgcgcggcagtcatcgccgtggtgcgcacgccttccccgggcaacgtaccgcaaaacagcagcaccttgtcgcccgatgccgccatgcgacgttcaaggcgcatggcaagcccgcgcgcagcctcgcggtaatgctccggcacatgcgggttcgtaagggtgatcgtttcgcgcctactcttgcttcgctttttaaaaacgaccttcggcagcgtgccgagacacaaaagatgcagcttagatgcaatctcctcctcgcgccgcacggtgcgccgtgtgcagccgtacagcaggatcagtcctgcgccaaaaagcaggccgtacgccgcgcccgtcaacgccgcacgtttgccgtcgaatatattatacggcgcggtcggcaggcttggggcgctcagcatatggagcttaatgtcgcccagcacgtagcgtgcggcctccgggtaacaatcaatagcggcgttcaggacattcaacgtgctttcggcattcgcgcccgtcgcggtcagcgtgaacaggttggaatcctccactgcgctcgccgaaagcgaagctgtaatagaatccgtgccgagcgcctgcttgatgccatccgttaagagctcgctttcgagtatgtacggaaacgtgcgcgcgagttgcgaagccgtggcggtattgtaataaaacccgtagctgaacccgccgctttccccgctgccggtggcgaccgtgaacgaagccgccgcgcggtacagcgggcgatacgcgcgctttgccgtgtaccacgagcccgcggcgcacagcaccgtgagcaaaaggcacgcccaccacagctttttcacaccgcgcagcacatcgtgcaaaagcgtgatgatgtcgatgggctccggcaccgcttgcttttccttttgcgtctcctccatatagacctccgaaacactttatttttcatataccgtaacgttttaaatgcctgtctgcaaatttcacgggcattatagcattttgtacccgatttctcaagcattttcgggatattgtatatatacaaatatcgcaaattccgttaaaaaatgaaaaaaagcgacgcctcaagtgaggcgccgccaataatcgacaaattaaatttctattttagtttcaatcagccttccggctccagcacgccgtacttgccgtcgcggcgcttatacaccacatcaatctcgccggtgtcgccgtcacggtacatgaagaacgtgtggcccagcatttccatctgcaaaatggcttcttccaccgtcatgaccttcacatagaacgtcttacgctttgcgatttccggttcgtcttcctcatccggcatatcgtagtacgtatccggcagctccacgggctgcatcttctgtgcgcgctcaaggcgttttttatttctacggatctggttgcccagtgccgccacaacatcatccaacgcttcgttcatttccgacgcagtggcttctgcacggtacagcatgccgcgctgcttaatcataatctccacggtctggcgattcttttccagcgttacggttacggtagcatccgcgtcttcatcaaagatgcggtcaaacttagagagcttgcgctgcaccagttccttaaaattctctctcaggttcacttttctgccaacgatcttgatgttcatacgtctaccggttttttccgcaaaaagcacaaagggatgtgcttttttcatctacggaaaaaacacatcctttctgaaagactcggctttcattattcagcttacggcttctgccgttctctgtacctacagtataaatcatttgaacaaaaattgcaatagaaaaataaaattttcaagatttataaacaatttgtttgcgatttaaatttctcataaaacaaaaagcgccgttccgaagaacagcgccgtttctgctttactttagttgttgcgcgggcccttgcgggaataaccgccgccgcgcttattttccgcacgcttgaggtccgagatcttctcatcgctcatctgcttaaagcgggacatcatatcttcaaaagagccggagttttcgcgcgcgcgccactcataatcgcccggtcttgcggggctctgcaccggggcagaagcttcgcggcggtgatagttgttctggcgcgggggtctgccgttctcatcgcggcggcgcggggggcgctgctgctgcgcgttttcgtctgcctttttcatggaaaggctgatcttgccgtcttcattgatgccgatgatcttgaccttcacggtctggccttccgtgacgaaatcgcgaatctcctttacgaagaccggggcaacctctgaaatgtgcaccataccggtcttgccgttaccgagatcgacgaatgcgccgaactttgtgatgcccgttaccttgccctcaaaaattgctccgacctcaagctttgtttcttgcataccctctaattttcctccgggatttcaaatttgttagttgttgccgcctacattgtagaacacacgctcgccgggctttacatagtccagttcgcggcgtgccaccttctccgcatagtctgtgttgtctgcgttctcttcattcaggtcatagcgcagctcgtcattgacgacctgctgttccttaagctcgtttttcaactgctgcagttcgtcctttttctggctgatggagatctgctgcccgacgagcatagtgaccatgaagcacgcaaaacagaacacggcgacctttaaaaggaggctgcccttatagcgtttaatcttgacttcttccatgggattcctcccctttccttatgccgagcgttcggctgcttttcttgttccattatataatgatgcgccgtcattattcaagtccttttttcgctttttttcgatttgttcagaaatgatttgtgttttttcccgctttttagcaatgcttccacctttttccgccgtccttgcgcgtattttgcaaaaattcggtttctaaagccgtgcaagcggcgctctgcatacggcaaaaagcggcaaatgccgtgcgtcaccgtgacctgcacgcataaaaagccgatgacttcgcaggcgatctgaaaaaagcgcgcgtgcccgacgctgaccgcaagggacagcaaaaacgtgacgacggcggcaaaaaaacaaaacagcacatccgtaaccgctgccgcgattttgccgagagagaacagcaggcgcaaaaactccagcacggcaaacacaaaccccagaagaacgccgcacacaaggcacagcaacagcgtttctgccggaatgccgctcattttaaaagccttttcaaaacgcccgtcgggcgcacgccgtctgtgtacgaaagcgccagcacgcggccctttacgagcagctcgcctgtttcggcgctcatgttttcaatgtacagcccttcgcccttaatgtgcaaccttccatctgccgtctgcaccgtgatgagtgtctcgctgaaaaaatccacgcgcgtaacgccgcttgccgtaagacgcgagcggttttcaatgtgcaaagaatgtgcttttgcgcttgccgtctgtgccactgtatcaccgatcctcttttatgctgtatcgcctatttatatgcagcgattttcggaaaaagaccgaacaaacagcgaatatttatgcacaagagcagctcagcatgttaaaagcacagtcaaaaaaccttacttctcttcgatgatttcgtacatcatagccgcttcgtctttttttgcatattcattcacggaaacgacgcgggccttcacggtgcgtgcgccgagcgtgagctcgatgacatcgttcaccttcacatcgtaggaagcgcgggcaatcttgccgttgacgacgactcgaccggcgtcgcaggcttcgtttgccacggtgcggcgcttgataatgcgggaaaccttcaagtatttatccagtctcatgttcaaactccttttctttaatacatggaggcacaaaactgcctataacagaagaacggacccacttcgggatccgttccatcacaaattatttgccaaaattacttattgacagattccttcagggccttgccagccttgaatgccggagccttggaagccgggatcacgatctcagcgctcgttctcgggtcacggccaacgcgctcgcctctctcgcgaacttcaaaggtgccgaaacctgcgatctgaaccttctcgccgcctgcgagggactctgtgatggaagcgataacagcggaaacagcgttttccgcgtctttcttggaaatggtagccttttctgcaacagcagcaatgagttctgttttattcattatgaataacctccaaatttttagatttatcttcatcacccacggcgcgaaccatcgccggagcgtgaattgctttattcttctgcgccgaactgctcaatataggcgcggcaggcttcagacagcgcctgctctgcatctacgccgagacggcgtgcgagctccgttaaattgaaaagcgctttaccaatcgattccgcgccgttttcttcggttgcaccgcttacagctttgcaaacgctctcgcgcaggtcatcgttcgtgccgttatccgcgcccattttcgccgcctttttcagtaccttctgggtacgcatcaaagcgggcatggcgggcgttacgctttcaagcacctcgcggtcggacttctgttttttcgtctcgcgcttaatctgatcccagtttgtcagcacctgctcggtcgtgtccgccgtcacatcggcaaacacatgcgggtgacgctgcaccattttggcagcaacgtcgctgatcacatcgtcaaggtcaaaccgaccggcttcacgctcgagctcactgtggaacgccacctgaaaaagcacatccccaagctcctcgcgcagcagcacggggtcttccgtatcaatggcttctatcgcttcgtagcactcctcaagaaaatcgcggcggatgctcttgtgatcctgctcgcggtcccatgggcagccgtccggcgcacgcagaatcgtgatgatttccttgagatcttccaatgtataacgggattttcctacatatttcaacgcagctttcatattttaccctatccccctgttttttgcaagtatttttcaagtctttttgtaattttttctccgtttggcagtgctttgatgtcttcttcacagatcccgcgtgcaatcagcaggaaaacaacatagataagcgcccccaaaaacaccgcaggcagcgcggaaaaacgcgattctggcagcaccgcacaccacgctttgtgtgttaagagagccgccacgccacagcaaacggaggccagaaacggctttttaaaagtggaaaagaaatctattttcacgcctgcaatacgccgtatcgcaatgcacgccaacacacttgcgagcgcatagcacacgagcgtgccgacagcgccgccaagcacgttcacacgcggcacagcggcgagcgtgtaatcgagcacggcttttacgaatagcccaatgagcgtcagcaccacgggcagctccacatggcccatcgcctgcaagatgctgttcagcggcccgcacagcgccgcaaaaacggatgccgcgcccaaagtcgtcagcacgcgccccacgatgaccgtgcccggccgtgcaccgtagatcagtagtgcggcgggctgcgccaaaacggaaagtcccacccccatcggcagtgccgtcaaaaacgtaacacgcagcaccgcttccacggtgcgcttcagtttctgcgaatccccggtctggaatgcccgtgtcacgctcggcagcgcgctgaccccgaacgactgcgttacgcttggcacgagcaaaaagagggtcagcgccatattgtagcagccgaaaaggtagttcggcacggtttccggcgcgtcgagattccctttggggatcgcgccggcgtacatggaaagcaacgctgcggggtctgtctgcacggcatagacgacacgcgtctgcaaaaatgacgcatcaatgagtccggaaaagctcatggcgactgccccaagcgaaatgggcagtgcagtgcgcagcaattttccggcccaaatacgcttgcttttcggcttcggcgcgcgttgcagcatcgcttttgtgacgccgtccctgcgactttggaagacaagcgtcaaaagccccagcaccgcgccgagcgtcacgccgaggattgcggcagcagcacctaaagcgcagacaagctgacagccatctgcttcacttttcacggtacagccgaataccgtgccgctcgcttgcagctcccgtgtgcccatatgcatcacaaaaatcgcgccggaaagcccgaaaataagcttgccgagcgattccgcaacctgcgaacgcgccgtaggcagcatattgcgcaggccctcaaaataaccgcggtacacggaggaaatactacacagcgcggcacacggcgcaagcgccaacatggagaaaagtgcgccggggctttgcaccaagtgcgtataaagcggtgcaaaacttgccatcagcagagcacagagaacgccgatgaccgaaaacaccgacagcgccgccgctttgatttgccgcacgtcacgaaaatgtcctaaggcgtcctccgccgcagtcagccgcgccactgccacgggaaaaccgacggtggaaaggctgaacagcacgttaaaaaaactgtacgccgtgctgaagtatcccataccgtcttccgtgatgatactcgataacgggattttaaacaacgccccaatggccttcaccaaaagaacgccgaacattaaaatgaacgcgccgtgcagaaatccctgctgtacgcgcgccgcgggccgtttttgctccataaaacccttccgtttcaaaaaagtttctcggcgaaagaaaaggaaagaggaggcacctctttccttctggttttacgtccttgcaggccgggcccgcgttttcaattattcctcggtcttgacttcctcggtcggctcagctgtcttctctgtctcgattgtgacttccgtcgtctccggctctgcggggacttcggccttctcgactgcttcggcagcttcttccggctctgcctgtgcgttctccagctttgcgccgcagtggctgcagaacatggaatccgtcggcatcttcttgccacatgccgggcaagtcactttatcctgcatggaagcgtactgtgcggaaaccgcggaaagctgtgcatacagatcatcgataccggcgatctggtctgcaagctcggcttcgtctgcggaaccggccttcttggcctcgtaaatgaagcggccaagctcctgatagcgcttcgtaatctcgccgttcagctcggccatattgatgcgcagcttggacatatccacaaactggcctgccattttgcctacggtctgtgcagcggattttgcgttgacaacaacatcatcaaaaattcccataacaaattctccttttgtggtttggaaacggaaccttaagaagcacaccgtttcatgtacctttctttagtcccattatagcgcaatttgtgtcaaaaagcaaatgacaaaccggcaattttgtaaacaaaggttaaattttccctgacaataaccttaattcgtaccgttttctactttcgggcccaaaaattcacgcagcatggagtttgcaggcaccagctcggcatcaatgggctcaaagcgcatcagacgggcatctaaatcgcgcgccttacggtaacacgggttatcctccgggatttcgcgcagaagcggaatgacaagcctgcgcagcacacacggttcatagatatgaatggagttcaccgtgtagtccgcggaaaggcggtacgggcggatgtatttatcttcgcccgccaccacattatcccacatggcgatggtgcgctccggcatggtatcgcgggaacggatatcacgcgagatgcggcgcacaaggcgaatatccatcggcgaaatgacctcgccgttgatatccttgatctgctgcttcacgctgacatacagctttatggtgctgccctccggcagatcacgcgtaaaaatggggttcagcgcgtgcagaccctccatgataacgaacccgcggtcgctgacatcgagctttcttgccgcaagcgttcgggtcttcgttgtaaaatcgtactccggcaaaaggcaggagccgctgtgaatgacagaattcaaacaatcctgaataagcgcaatgtcgagcgcgtccacggtctcatagtccttttcgccgttcggcagcacgggcgtttcgtccgggccaaggtaaaaatcgtcaagcgagacaatctcggcgtgcacaccgaacttgccgagctcgcgctgcaataaatgcgccgtggtcgtcttgccgctggaggacggccccgccagcatgcacaccttcgcggttttgtaatgcgtcacaatgttgcgcgcaatgttctcgatatgctcgtgataggaatcctccacctcatcgatcatgacctgcgggttcaaaagcgccgcgtcgttaatctgctctaagtgattgatatatttaatgtaaccgcttgcgaaattgctcatattgcttcgcgatgccctcctttcgttcgagaatctccgggtaacggctgatatattcatacgaatatttgaagttaaaaattcgtgaaagatcttcggaatacgggttcttaagcttcgtcacgccgcctgcgccgcacgccagcaccgtttcggtctcatccatcgtgaaaatattatatgcacactcggtgcccggctttgcccagcccgtattttccaaattgcctgccatacggctttggcgatagagataatacggctcaagcccctgctctgtcagccgcttttcggcataagccatcatgcggtcggcaagcgcggcatcggcgtgggccttgttgatttcgccgctctgcgtgatgaacgaggagcgcttcaatgcgagcgcgtgcaccgtcacgttctcagggtcaagcgcaatgaccttttcgattgtgtcacagaacgtctcatacgtgtcacccggcaagccgacaatgaggtccatattgatattcgtaaagcccgcttcccgcgcgaggtgaaacgcatccacagtctgctgcgcagtgtggcggcggccgatgttttcgagcacgttgtcctgcaaggtttgcgggttgatgctgatacgcgaaacgccgcttttaagcagcgcatccagctttgcacggtcaatggtatccgggcggccggcctccaccgtaagttcctcgcactgcgacatgtcgaacgactctttcacaacgcggatcatctcggaaagctgctctgcggagaacgtcgtgggtgtgccgcccccgacatacacagcgcgcaggtttaagcccaaagcatcggcgactttcgccgtctctttcagctcttccaaaagcaggcggtgatattccgggatctgtttcttggccttttccacgctctgcgaaacgaatgagcagtacgcgcagcgcgtggggcaaaacggcacggaaatgtacaaagagtagtcgttttcacgcactttatccgtaatgggcttttgtgcgcgcagggtgcgcaccgcaagtgccgttttttcgtttgagacgaaatacttttcgcggaacagccttgccgcttccgcttcgccgtgctgttcggtcaactggcgcaggagcttaatggggtgaatgcccgtcagcatgccccagcgcggcattttgcccgtgtgggcgcaaaatgcatcaaataacaaagacaccatgccgtattcggtctctgcgcctacttttgctttgcgctccgttttgccgtctgcgtcttcaatgcgcacgatatattcgccgttttcttcggcggtgtacaccgtgcggttttcatcgctcggcataaattcgtgctgtaccgtgactttatcaaacggataaaacacgcggcagaggttttccgcctcatagtgataagggtgatcgataatatataaaaccatacattttcctttataaatacggatttcggcgcttttcgtcttccagcgtcgtcacggggccgtggccgccgcagatatcgggatttccgggcagcgccgcaagctttttcagagactcacgcagctcggcactgttgccggttggcaggtcgcaccgcccgacggagtagcccatcagcgtatcgcccgtaaacacggcgtccggcgtaatgtagctcacgccgcccgcggtgtggccgggcgtgtgcagcaccgtgaccggcacttcgccgatctgaaatgtttcaccgtctttgaaagcctcgtgcaccttgcaggtgatggactcgtacatcatgagaagcgagccgttttgcttatcgtccgctgcaaacgccgcttccgtctcataggcgcacaccggcacaccgagcatctcgtgcaggcggtcagcctcccaaatgtggtcaaaatggccgtgtgtcagcaaaattctttgcaccgtatattttttaatttcatttaacagagcgtcgttcaaaaagccggggtcaacgaccgccgcctgattcgttttttcgtcgatgagcaggtagcaattttccgaaatagacccgcccgttatacatttatatttcatatctttgtttacctttagctgcggtcaatagagattacgcccttaatcttctgcaagcggtcgataacggtctgcagatgcgaaaggccgttgatggtaatcgttgccgaaatgacggcattctccgagtttttgatctcgcgggagttgagcgagtgaatgaaaatgtgcatgttgaaaagctgctgggtcacgtctgcgagcaggccggaacggtcggttgccacaatatgcagcgtagacttgaactcttccttgacttcacccgcccagtacgcacgcacccagcgctccggctccggcgcctgcgagaaatccttcggcacgttcgagcagctgcgtttgtggatggaaacgccgaaaccgcgcgtgatgaagccgacgatctcatcgcccggcagcgggttgcagcagcgggagaacttgatgagacagttgtccataccctctacgagcacgccgcctgccgctttcttgttgaggttcggtggcggggtctgctgcgcaatctcctgctgcggttcgggtgcaggcttgtgagtcttctggtattcctcttttacgcgcggcaggagcttccaaagctgaatgccgccgtagccgacggccgcgtaaaaatcatcgggcgtgacgcagctgtggcggcggccggcgctttccagcataaactgcatcagctcgtcgctcatcacgatgccgttgcgcttaaattcgcgctccagctctgccttgccctctacgatgttctcatcgcgcttttctttcttgaaccatgcgcggatcttattgcgtgcttcgcttgtacgcacgatggaaagccagtcgcggttcgggccgcgaccgacctccttcgtcgtcaaaatctcaatgatctcgcccgtttttaccttgtaatcgagcggcacgatcttctggtcaacctttgcaccgatcatgcggttgccgacggcggaatgaatggcatacgcaaaatcgataaccgtagagcccatcggcaggttgataacgtcgcctttcggggtgaagacgaacacctcttccggcgcaagatcggtcttgatagagcgcacaaggtcagtgatatcttcactttcggactggttatcgagcatgttgcggatccactgcaagcggccctccagcgagtcgggcttttcgttgccgctcgtcatgccgagcttatacttccagtgcgccgcgatgccgtattctgccgtgtggtgcatttcccacgtgcgaatctgcacctcgaacgggatgccctctttgctgatgaccgtcgtgtgcaaggactggtacatgttctgcttcggcgtggaaatgtagtccttaaagcggttcggcagcggagtgaacatatcatggatgataccgagcacattatagcaatcgttgatggtatcgacgattacgcgcagggcgaacacgtcgtaaatttcgtcaaagctcttaccctgaatgaacatcttgcgataaatgccgttgacgctttttacgcgcccttcaatatatacgcccgggataagcggctccacacgactgcggatcatttctttcgttgtctcaataaactgcttgcgctttgtgctgcgcgcctcaaggttatcttcaatctccttatacgccacagggtcaaggtactttaaagaaacgtcctccatgtattccttaaccttgcgcataccgagacggtgcgcaatgggtgcgtacacctcaagacattccagcgccttgtcgcgctgcttctgcggcgccacgtattcgagcgtcgctaaattgtgcatgcggtccgcaaatttaataatgatcacgcggatgtcctcgctcatcgcaataagcattttgcgcaggttttccgcctgctgctcttcacgggaggagaacgggatcttgccgagctttgtcacgccgtccgtcaggtttgcaatctccttaccgaacgctttcacaatgtcgtcatacgtaaccggcgtgtcctcaatgacgtcatgcagcagacctgccacgacggacggggtatccatgccgaattccacaagcttatacgccaccgcaatggggtggatgatgtacggctcgccggagcgccgcacctgtccctgatgcgctgcctccgcgaacttatacgctttttcgatcaacgcgaggtcatattctttttcgcttttttcgatcagtgacacaaggtccgcatacgtttttgctgcttctgccatcgtttttcactccttccgttcccttattgcagtgccaaaagcaccggggaacgtgtaatatctgttttgccgctcgtttcgatgagcgttgccgtaaatgtatcgtctgcaatttcgctgtgtaccaagccgcgctcctcaaatacaagaagcgccgttttaaagagtcccagtgtcatatcttttccaaactgcgaaacaaaccgaacctggtccgtctctttaccgtttaccgtgcgcagtgcgcggtaaatggccgctaagcacgcgcggtcggggtataatctgtttttatcctctgcggaaagcacctcgccgcgctgccacttttcaaagctcgcaagcgacgctatattcttttccgtattgaacgctgcaaacttcatatcgcgcacgatgacagtcagcgacggctggccgcgaaattcgcgcgcctccagctgtaccgcaaggtcgatcttatcgccgatgtggtacggcagctcctcgggctttgtattaaaacgcatcgccgtgatgaccgcgccgttcttttctaaggtcaggcgcagatgccccccgccgccgaccggtgtgacattggaaagctccatgttgaataaaccgaacaccggctgcgggttgccgtttccaaacggctccaactgcgtcaggctttgcgccatggaaaccgaaagcgccgccgggttcagcttgcagtccagtgtgaccgtctgcgtgggcatctgcgggaagtgctccgccgcatactgattgatgcgcttgcggaacgcttcgatgttttcgggcttcaacgtgatgcccgctgccatgggatgtccgccgaatttgatgagcaagtcgccgcacgcgcagatggcttcaaacagcgagaaaccctcaatgcttctgccgctgcccttcgcctctgtttcgccgcgcgaaatgatcatgcacggcttgccgcagcgctccgtcacacgggacgccacaatgccgataacaccatggtgccagttttcaccgtccaccacgaccacgcggtctttcatgtatcctttcgcttcgatatccgcaaacgccgcttcggcaatctctgcttccacacggcggcgttcctcgttatcggcgcagatttcctcactcagtacctcggcttcctcttcatagccgctgatgagcaagcgcacggcgcgttccggcgcgcccatacggcccgtcgcgttgatgcgcggcaccagcgtaaacgccacattcgtgctcgtcagtgtcttgcctgcaatgcctgcgttttccaaaagtgcctgcacacccgggcggtcgctctgtgaaagacgctcaagacccgcgcggatcagcgtgcggttttcgcccgtcaacggcacaatatcgccgatggtgccgatggccgcgagatcgctgtatgcttctaacagatcttccacgtcgcccgcgccgtcctccagcgccataagcaatttaaacgcgatgcctacaccggaaaaatgcttataggggcttgtgtcatccggtcggtatgcgtccacgaccgccacggcatcgggcaatatctcctgcgggcggtgatgatcggtgacgaccacatcaatgccaagctcgttcgcgcgcgctacctcctgcacggaggaaatgccgttgtcgaccgtgacaatgagcgacacaccttgctcttttaagtattccacggcgccgatgttcatgccgtaaccttcgccctcgcgctgcggtatgtagaagattacgtccgcaccacgcgtttcaaggtacgaatacagcatggcggtcgaagtcacgccgtcggcatcgtaatccccgtaaaccgcgattttttccatgttgtccaccgcgcgggtaatacgcgccgcggctttgtccatatcttttaaaagaaacgggtcggagagcggctcgccctcgccaagaaattcccgcagatgcgcggcatcgtcaaggccgcgaatattcatcagcatcgcgaggaagaacggcacgccatacgtctgtgcaaacgccgccgcgcgttccttatcgagaggacgcacctcccattttcgcaagatcattttgcttcaccctttaaatcaaaagcccgattttccgcgcaaccccaactactgcgcggcaaccgtgtcctatgtaaattcgtttcatttctaaaagaatattttagcatttttttgccggttattcaacagaatttcacaattatctgcgaaactgtttgtagaaaaagaaaaacacattctccatctgtcggcaaagcgacgaacaaagtctttgattaaactttcttcaagaaagtttacggattctcaagacagtgccttgagtcgtcgtccgcaaacggcgaaacacttttgcgttcgtaatcgtcaggacaggtagacttgaatttccggcggatgttcaagccgtaggaagcccggctgtatgggttttctgaacaagacaccaaagtgtcttgttttatacgcgctcagcgcaaaattatttcccgaatttttgttgatttttcccgaagaaaaaagtcgataaattatagaaaacaggaaaggcatgtggtaaaatggaaatgaaagattctgtatctttgcagaaaagaggtgccgttatggaagaaaaaacacggaaacccgaaaccgccaagcagaccgctaaagaacaccatgtgccggaacacgaagacgagcaccaacacggcaacccgcaatttgcgcttaaggtgctgcttattctcatcgccatcattttggtgatcgttattttaaaagccaccggcgtaccgttcgccgtaaaagactggctttcgcacgtcaccggcgacatgatcgcgctacgctgaatgtactctccccataaaacacaaacccgccgaaacttttcagctcggcgggttttcattttgcttatttattccgaagcattgctggtggaagattcggttttcggcgaaagcgtcacatgcgccgtgtagctgccggtcgcccagcaggaatccgcattgttaatcgtcaccgtcaccggcgcttccatgctgccgctcgggtctgtcaccgtggaaagatccaccgtacagaaaacggaatctcccgtcagcttcgagatctgcgccgccgtgccgatgatcttcagcgtgagcgtctttgtagaaagctctgcttccataccctccggcacgttggtgacgctgatgttgctcgtcagcacagacgtttccttgtaaccgttcaggttgaatgtaacggtcgcgttttccactcgcgtcacatttgtcacaccgctcggcaccgggatagccaccgtgaacgtgttgttttccggcgtaacgtccaggaagttgattggcgtggagagcgtcagggtcgtgtactttgagaccgtttcaccgtcgccggcaatttcaatttctgccgggtcgatcgtgatgcggttcgaggcaaagctgtccggaatattgcgcacgtccgcttccaacttgaccgtctgtcggctcgtcaccggaatggagacctccaccgtgtcgtcgctcagcttcaaatagagctccgttgggtcaagtacattgccgttcgcgtcgtacaacgtcactttgcaggaaagcgacttcgactgcgtgagctcttcgctgaacttatattccaacacggcacgcgccaccttgttcacgctgctttccgggccggagaccgtgataagctccgtagaaagtgtgggcgtagaaggcgcatagtaattttccgccgtagtgtactgaaaatttgtttccaaagtgagctgcgtttctttatatttatcatacaccactgtaatctcggacggcgaaacgctttccacctcgtattcggcgagggtgttgcccttttttgctgcgcgcagagaaagcgtcgtctgttgcaagctgctgcccgtcagcatgctgacggaaggatccagcgtccccgtaacgccgatgtcctcactcgtcaccttacttgtgataagtgagttgcccgtaatactcacatccgtcgcgctgctgctcatactgaacacgcgcacaccggcttcctgcgccgtatcggaaatttcaacgttaatcggcacattgcggatcacggtcgcacggctttcggagttgctcgccatcatggcaaaccagacggccgccgcggcaaggaatgaaaagataagcaaaattgtgttgttttcaaacacgcgtaagcgttgttttacttcgtttctgggtttcttagacatttttgccatcacttcttcaccgtccttttgcttttcagcacgtcgaacttacggcgcacggtggaagcttcttcctgcggaatgaggtacccctccaaaacatcacgcagcgtatcgcgcgtaaagcggcacgccaaaacgccgtttacagccacggagatctgccccgtttcttccgaaaccaccacgaccacggcatccgattcctcactgacaccgagcgccgcgcggtgacgcgtgccgagctctgcagagaccgaagtgtttttcgtcagcggcagaatacagcccgccgcatgaatcatgccgtcgcgaatgatcatggcgccgtcgtgcaaaggcgccttattgaagaaaatattgcccacaatctggccggaaggctcgcagttaatctgcgtgccggtctcaatgatgtcgccaagcttcgttttgcgctcgaatacgataagcgcgcccattttgagctgctgtaaaatacccacgccgtctaccacggcgttgattgccttgcggatctgcgcgcggtcatagctgcggtcacggcctgttaccacagccgcaatagattgtccgacgttgttgcggcccacttgctcgagcgccttgcggatttccggctgaaacacgatgaggatcgcgacgaaagcgaactggaagaaatacgccagcacgcggctgaccatcaccagattaaaatacgaagaaataataaacagaacgacaagcagaaaaagtccctttacaagctgccccgcgcgcgtttcgcgcacaagcttgaccacaccgtagatcaaaaatgcaacgatgataatatcaacggcatctttaaattgaaaattcatggcaatgctcaccatccactcccaccaggaagcaatggcttcaaaaaccttattcaaagcattcacctctttgcacaggattcggcggtacatgcacacggtgcacatccgctccatacgatttactttctacaaaacctaaatgcgtactgtatatagtttaacacaaagaggtggggatgaaaagggggaattgtatgttttttcctgttcttttctatatttttcgatttttatttacactttgttcatttttattcgacttttcgcgccgcactttcagcccggagcgaatagaccgtgcgaatcagctccgtaatgtccttgtcggtcgtgaacgcacccggcgaaacgcgcaccgcgccgccgggcgtttcaccgtccgttcccattttgcggtgtacgagcggtgcacagtggaacccacagcgcacggcaatgttccgctttgcaagtacctcgcccacttcttcactctgcatgccgcgcacgttaaagccgagcaccggcacaaagtacatcgtgtccggcattgcggtgtataaaataacatgcggcatgtttttgaatgcctcgtatacgcggcgaatatggcgcatttccctctcccgcagcatatcttcaccgttcgtgcgcacaaaatccatgcccgcgccgagtgcgaggatgcccggcacattctgcgtgccgctttcaaggtactccggcatttcccgcggctggtctagctccaacgcgcgcgtacccgtgccgccctgtttcaggctttccagcttttcgccgtttttcgtaatgagcatacccgtgcccatcggaccgtataaccccttgtgtcccgcgcagcaaaggtaatcgatgccgtcgcgctccgcatgaatgggaatcaccccgccggactgcgccgcgtccacgcagatctccgcgccgtatatatgcgcaagcgccgccagccgctccacaggcacgcggatgccgaatacattcgaggcctgcgtgcagacaaacaaccttgtgttctcgcgcatcgcatgacggaacgcgtcgagcgtcgcgtcgttgtcgccgggcgtcacgggcacaacggtaaacgaaacaccgtgcgcctccatggctttcagcggccgcaaaaccgcattgtgctccaaatcggtcacaagcacatggtcgccacgctttaacgagtggataacgatattcagcgactgcgtgcagctcggctgaaacgagatgcactccgggcccgccgcaccgaaaaagctcgccgccttctgccgcacatcgtagaccgcctgcgccgtctgcaagctcattttaaacccgccgcggccggggttcgcgccgaactgctccagcgcctgcgccattttgcggcgcaccgaaagcggctttgggtacgtcgtcgcgctgttatcgagatagatcatttcttttcgccccgttccgcacggtagaacactttcacgcctgcatcccgcaaaatgcgctccgcttcgtccgtgcgctgcggaacatatacaccatagccgcagccgctttctcgggtgcgcggcagccgctcaatgtaggcttttatccctctttgaaaaagcagatcacggcttttcagcgcataggtcacgctgctgacaacaataagccgcttcccgcccgtgtctcttttgttttccattgcaagcacctccaagccttcaaaacagtctcatcaaaacagaatatgagacaagccgggaattggtgcaaaaaagagctccgccgaagcgaagctctcaaaaatactgcaaatttatttcagcaggcacaccgcatgcgctgcaataccctcgccgcggccggtaaagccgaggccctcctccgtcgtcgccttgatgctcacgcaatcgaggtcgaggttgcaggcggatgcaatgttgcggcgcatctcatcgatgtacgggcgcagcttcggacgctgtgccaaaaccgtcgcatcgatattttcaatcccaaagcccttgcggcgtaccgccgccaccgccaccgcgagcagctttaagctgtccgcaccggcgtactgcgggtcatcgtccgggaaaagcacgccgatgtccccgagcgtcgccgcgccgagcaaagcatccgctatggcatgcgcgagcacgtccgcatcggaatgccccaaaagccccttttcatacgggatatgcacgccgcccaaaatgagctttctgttttctacaagcttgtgtacgtcataaccgtgaccgatccgcatagtaacactcctttacttttccaccgcaaaagcctctgccacaagcagatcctccggcgttgtgatcttgatgtttttgtagtcgcccggggtcaaatataccttgccgcccgccgcttcaatgagctggcaatcgtccgtatattgctttccggcgtttttcgcaaggcacagcgcttctttatacaaagaaaggcggaatacctgcggcgtctgaatggcgcgcaaagtgcttctctccggcgtagcgcacaccgtgccgtccgccgcagcaaccttgatggtgtctttcaccggcaccgccagcgtcgccgcgccgtatttttccgcgtccgcgcacacggtttcgatttcctccggcgtgataaacggtcgcgccgcatcgtgcacggcgatatactctgcgtcaccgcaaagcgctgcaccgtttgaaacggaatcctgccgctccttgccgccctcggtaatcgtgagcggctttgtgacgaacgccgacgctttttggattgcatcgaaatcgcacgcacgcgccacaataacgatctttgagatgcacgcggcattctcaaatgcgcgcagtgtacggctcagaaccggctcgccgccgatctccatcatcgttttcgatgcgccgccgcttttcatgcgcgcagagctacctgccgccaccaaaattgccgccgttttcatcacgtttcccaccttatttttcaagtattcaaatgcgtttgcctaaaatgcgcctaaaatataaatacagtataccgcgatgtttaccgcgggtcaaggcaagataattttctctttcgacgttttttatcaaaaaagcattgaattcccgccgtcacctatgttagaataagcttgtatgtaaagattaagtaagaaaaaagaaaaaaatttgaaaagcgagcgttttgcgcacacaaaggagctgcaaccacaaatggacattttctccgttattacactctttggcggacttgcgttcttcctctacggcatgcatttgctttcctccagccttgaaaaaatggtcggcggcaagctcgaacgtattttgcgttccatgacctcaaaccgcttcaaggcccttttgctcggcatgggcatcaccattgcgatccagtcctcctctgctatgacggtcatgctggtcggcctcgtcaactccggcatcatggagcttgggcaaaccatcggcgtcatcatgggctcaaacatcggtaccaccgtcactgcgtggatcttaagcctttccggcatcacgagcgacaacgttttcgtacagcttttaaagccggagagcttttcgcccatcgtggcgctcatcggcatcattctcatcatgttcaccaagagcagcaagaaaaaagacatcggctccgtatgtgtcggcttcgccattttgatgaccggcatgaccatgatgagcggcgcggtaaaaccgcttgcggacttgccgcagtttaaagaggtcttaacgattctcgataaccccatcatcgccattttagtcggcgcaggcatcacggcactcatccagagctccgccgcttcgctcggcattctgcaatctctcgccatgacgggcagcatttcgttcagtatggcgctgccggtcattatgggccagaacatcggtacatgtatcacggcgctgctttcctccatcggcaccacaaaaaacgcaaagcgcgtgaccgccgtgcatatctactttaacgtgctcggcaccgtcatctgtctttccggcttttatattgcaaacagcattttccatttcacattcaccgaccagccgatttcctcgtttatgatcgcggtcgtgcattccgcattcaacctcatcaccacgttcattctgctgcccttctgcaatcagcttgaaaagctcgccgttatcaccgtgcgtgataagcgcctgaagcccggcaagcaggacccgcacgcggttttgctcgatgagcgtctgctgctctctccgtccttcgcgattgcggagtgccgcaatgccaccacaaaaatggcagaccttgtgcgcgacaccattttggatgccatcggtctgctctcgcattttgattccgccacagcagaaaaaatcgagaaaaacgaagaaaccatcgaccagtacgaagataagctcggttcttacctcgtcaaaatttccagtaaaaacctctccacgtccgacagcaacgatgtttcgcagctgttgcataccatcggcgatttcgagcgtatcggcgaccatgcggtgaatctcctgcgcgttgcacgcgagatccacgataaagatctgaaattctccgaaaaggcccagcaggagcttgaggtcttcacaggtgccatcatcgagattttgaacatcacgacagacgcgttcgtcgagaacaacttacagcttgcctacgaagtagagccgctcgaacaggtcatcgattcattgaaagttgaactgaaaaaccgccacatccgccgcttacaggaaggcaagtgcaccattgagctcggcttcgtgctctcagacatcctcaacaatttcgagcgcgtttccgatcactgctctaacattgcggtatgcctgatccagatcaaggattccaccatggacacacacggttacttaaacgagatcaaaacctccggcgacccgcgcttcaccggctattacaaccgcttcacaagcaagtatacactaccggaaagccgccacaaaaaggccccgcaggaagtacctgtaaaaagctaacccagctatttaaagccgcatagaatttaagccctccgtatttgtttgcggagggcttttctcatttcttctgtgcctcgtatttgcgctttgtcgccataccgccgcggatatgccgctgggctttattcaccgccagtacgctgctcacctctttgtaaagccccatatccacgctgcgcagccgctcggcaacgtccttatgtacggtggatttactcacgccaaactgctttgcggcacggcgcacagtagctttgttctctacgatatactcccccagcatggcggctctgtcctcaacattctgcttcatcgtaacacacccttgtctgtgatacttgtgctgcattatatgttgagcttttctctgattatacctctttttgttttgaaaaagaatttaaacgctcatcaacacatggaatcaactgttactgctctaccgtgcattccgatattcgttaatcatgagccgctttttccttgcaatcccctatgaaactagaaccacttgcccagccaagcagatctctttataaaagaaagccagcgactaaaaggcgctgtctttctttcctagttatcgggactcctgcatatcaattagaatggatttctttttgcgtgtgccgtaccattaaacaaaatatcatcagagagttccaccaccatatgcaagtcgctgggagattcgacttgtttgcctaaaaccactacattgtcaaaatagatatttcgggggcgactcatttccgtatgcatctcaaaaccgcgaataatagaaacagggaaattaccattcagaatttccacgttacggaaatatatattttcgacacttccgcgttttcgatccaatgagtacttggaatccaataccttgatgtcgacaaacttttcctgagcatcttcaacgcggatatcttcatacacaatgtcatgaatgtgagcgcgatctgcattgtggatggtcagcacgccgccagactgattaccctcatactcgcaatgaacgatgtccagatctcggaatgtgatgtcgctaatctcatcgcagcgcacttcatatccgatttccacggcgttaccgggttctgcattccacaaaacgcagtgttctaccagaatattcttcacatccctattggcagcagggtcgggataacttgcagctttgatgcacacgcagtcatccgaagcgcgaataaaggaattacgcatggttacgtcttcgcagcctacaatatcgatgccgtcacccgtgcaaactcgagacatgatgtttacatcctcaatctctacattccggcaagcgccaggaaccaggtgccacgaaccaccgtccaccatggtgatgccttgaatcttcacatcatcgcaaaacaccattcgaatcattggtctgccgccaccgttttcttctttcggatgccatacacaaccattcagaatgccgtttcctaaaattttcatgccgtgggcgaaaaaagcattcacacaaccacagacaacactgccctcttccaagaaaaccgtttcttccgctttgacctctaacgtgccaacattgtagactttcccactctcaaaaagatgatccactttttcaggcttcgggacacgctttgtgcacaagataaagagcggtgtcttcaaattgccatctaactccaaggtgactttactgggcttttccagccggaagctcaactctcggccggaaatctgagcctgaacattggtcttggccggacggaaaaccgccttttggaaatctttggatacttttacctgaaaacttagcggaaaatcgtcgtccacaaccggaattacgtaatcaaaactatccgtgtggtaaaccgtcagctcctttccgccgcaaagcacagtgtacaaaggagatttttccagttcctcaactttatacaacggctccgtaattcttgcaggattgggattgtaacgcacagccacttttactcctccttaaaataatggtttttcctttatggaagtgattatagaatatcatgtctgaagaatattgaaaacaaacaattttttcttttattcctacaaaattaagcttttactaaattttattagtgaaaatataaagaatcagcctgtatttatgccggaattacatcattcacgatgggaagctgtaaaagcatcatgtggcagtcggtatagaggagcttcagcataagtttaggctacaatatcttgcgccgcaaactcggggtcaactgtacagctttaccgatataaagagccgcttacaataaggaggtaatcgagaaaatccactgcctccgcatcgcagatatttcattcatattatatcaatttttcaaacacttgtcgagtataatttatactattttccaattttacttccctgccatactctattaaagcttttatagtatagcaaacggtccatctgcatcactgaacacagctttgtatttgtatcgtttcggatatattcattttcgattgtccctacaagatcggcaccgatgtgatgccggtgctgcattgtacgttgagcttttacacaattatgccggttttttaatatagcaagacccccgatctgcattgctgcaaatcgagggtctctttatttcagcggtttacgccgcttttgtacggttcggtacaggcggaaaattccttgcggaattattcctcctcagaagccatgtgtgcgaacttctcgtacttctcttctgcgtacttctcagccttctcgaagagctgctcggctctctgcgggaatgcacgggtaaggctgttgtaacgaacctcgcccatgatgaagtcacggtaagaagcagacggcttcttgctgtcgagctggaacggattctcaccgttgtcagcacggcgcgggtcgaagcggaaggtatgccagtagcctgctgcaactgccttcttctcttcgttcatggaaacgcccatgccgcccttgataccgtggttgatgcacggtgcgtaagcgataacgatggacgggccatgatagctctcagcctcatgcatagccttcaggcactggttcatgtcggcacccatagcgacctgcgcaacataaacatagccgtagctcatcatgatggaagccagatccttcttcttcacagacttacctgcagccgcgaactgtgcaacagaaccgaccggagtagacttggaagcctgtccgcctgtgttggagtaaacctcggtatcgaagaccagaatgttgatatcttcaccggaagccagagcgtggtcaacgccaccgaagccgatgtcgtatgcccagccgtcgccgccgaagatccacatggacttcttagcgagataatccttatccttcagaatctcggctgccttctcggaggaggaagcctcaagagccgtgatgtaagcctcagccgccggaccgttttcagcgcggtcagccatggtctcaacccacttctcagctgctgccttcagctcttcgcttgcgccttcttctgcaacgagctcattcgtgagctgctccagacggccgcgaattgcgttctgtgcaagcgtcatgccaaggccgaactcagcgttgtcttcaaacagggagttctgccatgccgggccgtgaccctgcttgttgacggtgtacggcgttgccggtgcggaaccgccccagatggaggagcagccggtagcatttgcaatgtacatcttgtcgccgaacagctgggtaacgagcttagcgtacggggtttcaccgcagccgccgcatgcgccggagaactcgaggagcggctgcttgaactggctgcccttgaccgtggtgtccttgaacttagcaagaacttccggcttcggatccagcttaacgccgtaatcgaatacttcctgacccgggcgctcgttgtcgatcggggacattgcgagggccttgttgcccttcatgcccgggcaaacctgtacgcaagagccgcagcccgtgcagtccagggtggaaatcgtcatgacaaagttcatgcccggcataccggtcatggccttgctcttcacagcagccggagccgccgcgagctctgcatctgtcatcggcaccggacggataaccgcgtgcgggcagaccatagagcagaagttgcactggatgcagttttccggaatccaggtcggaacgtcaactgcaacgccgcgcttctcgtaagcagcggtgccctgcggggaggtgccgtctgcatacttttcaaaggtggaaaccggcagatccttaccgtggaaggtgttaaccgggataaccacgttgtttacatagtccacgagctccggacggtcgccggtcgcaacgtgcttcgtggaatcatccacagcgtccttccaggaagccggaacatcaatcttcacgtagccgttagcgccgcgttcaatagcgtcatggttcatcttaacgatggcgtcacccttcttggagtaggacttcgtagccgcatccttcatgtagcggattgcgtcttcctccgggatgatcttcgcaatggagaagaatgcggactggagaaccgtgttgattctggtgccaaggccgatctccttaccgatcttgaagccgtcgatcgtgtagaagttgatatcgttatcagcaatgtatttcttaaccttgcccgggagcttctcgtcaagctcttccggcgtccactggcagttcagcaggaagctgccgcccttcttcaggtcttcgaccatgtcataggtgccaaggtaagccgggttgtgacatgcaacaaagtcagcctgggagatgtagtaggtggacttaatcggcgtatgaccgaaacgcaggtgggacatcgtcagaccgccggacttcttggagtcgtagtcaaagtaaccctgtgcgtacatatcggtgtggtcaccgatgatcttgatggagttcttgtttgcgccgacggtaccgtcagaaccgaggccccagaatttgcaggactttgtgcctgccggtgcggtatccgggtgctcgtttgcttcgagggacaggtgcgtaacatcgtccacgatgccgatggtgaacttcttcttcgcatcgtcgcccttttccatgttgcggtaaacagcgatgatgtcagccggcttcgtatccttggagccgaggccgtaacgaccggtgagaaccttagcacagccgaactgcgtgccgttgatagcagccagaacgtcaaggtacagcggctcgccgatggagcccggctccttcgttctgtcgagcacggagatcgtcttaacggtttccggaagcacgtcaagcagatactttgcaacgaacggtctgtaaaggtgaaccttaacaaggccaaccttctcgccggctgctacgaggtaatcgatcacttcttcgatggtctcacagacagagcccatagcgatgatgaccttctccgcatccggagcgccatagtagttgaagggcttgtaatcggtaccgatcttctcgttgaccttgttcatgtaatcgacaacggtctccggaatcgcatcgtagtacttgttgcaggcctcacgagcctggaagaagatatcgccgttttgtgcctggccgcggagaaccgggtgctcaggattcagagcgtgtcttctgaactcgtttacggcatcccagtcgagcatctcgccgagatccttgtagtcccatacttcgatcttctgaatctcatgagaggtacggaaaccgtcgaagaagtgcaggaacggaaccttgccgtggatagcggaaaggtgagccacagcgccgaggtccataacttcctgcgggctgttggagcacagcattgcataaccggtctggcggcatgcatagacgtcggaatggtcaccgaagatgttcagagcgtgggtagcaacgcagcgagcggaaacgtggataacgctcggcagcagctcgccggccatcttgtacatgttcgggatcatcaggagcaggccctgagaagcggtgtaggtggtggtaagagcaccagccgccagagaaccgtgaactgcaccagcagcgccggcctcagactgcatctccgttacgcgtacttcacggccgaaaagattctttctgccggcagcagcatacttatcggtctcatcagccataacggaagacggcgtgatcggatagatcgcagcaacgtcggtaaacgcataagaaacatgcgcggcggcgttgttgccatccatggtcttcatttttcttgccatttaactaattcctcctttaaggattatcaatggatttacctgacggcgcagtaccccgttcaccgccctgccgtttgcagaactctcccgtaagcacctgtcgtcgttcaaaataaattttatcattttttcgcctatatgtaaaggaaaaaacgaggattttttgaaatttcttctgaattaacagagattttcggcattttttatttttctccgcttcgcctttcgcccttttcgtcgttctccctccgctttgtccgggattcggcgcgcctccggcataaaatattgacaacagcgtttttttgcggtaaaattttaataattatatatcggtgggcagttagttttagctaaacatcacgtgacgcttttgaaaagaaaactcgctttttcatattgcgtttttctttgacttttgcggaaagcgacttagggcgcttccctaagaactcgcgaactttattctcccgccttcacgaaagcacattcaaaaccatttcactgctcccaaactttcagaaaggatgcttttttcactatgaacgacgacccttacggcaatttactgccgtcctcgtccgtcttacccctccccctcgctctgttgctgtttctgctctttttcgtgcttggcgcgcttttcgccatgtgcgaatccgctgcggaaacggctaacgaatcccgcatcaaaaaagatgcggagtccggcgaaccgcgcgccaaaaagctgctcgagtatctcgaacgcagcgcaggcatcatttcgcccctgcaatcgggcatgatgcttatgggctcctttgctctcgctgttgcggtcactggctttgcgccgcgcctttacaacgtattcatccgcgccgcgctccctacggctgccgctgccgtgctttcggcactgctttgcacattgctgtgcgcaggtctttatctaacggcagcagacctcgctccgaaaaaattcgtagcgcacaaggctgcacacggcatgcagcatacatacaaactctgccccatgctgtgcgccctcagcgccgtcatgcatccgtttgtcctcttgtgcaacttcatttcggacggtctcatgcgtcttttgggcaacgaccccaaagcgcttgatgaaaccgtcaccgaagaagaaatcctccacatggtcggcgaaggcgaggaaaaaggcgttatcgaagaaaatgagcgcgacatgatcacgaacattttcgatttcaacgacaccaccgtcaccgagatcatgacacaccgtacggacatctgcgccatcgatgaggagagcaccattgcacaagccgccgtacttgcggtggaaaacggcttctcccgcctccctgtctaccgcgaagacatcgataccatcgtcggcatctgctatgttaaggattttctgccctacgtcaaccagcccgtaccggatttcatccatttaaaggacatggttcgcccggcgtatttcattccggaaacgaaaaagtgcagccagctctttaaagagctcaaggagcgccgcctgcagatcgccatcatcgtcgatgaatacggcggcacggcgggtctcgtcacactcgaagacctcatggagtccattttcggcaacattcaggacgaatacgacaacgagcaggaagagatcttccgtgtcagcgaaaacgagttcactgtggacggcaccacctccatcgacgagatttccgaccttaccgacactgagctgccggagggcgattacgataccatcgccggccttgtcaccgaccttttaggccgcattccaaaagaaaacgagcaccccagcgtacaggtctgcgggctcaccatcaccgtacttgaaattgaagaccagcgtctttcccgcctgctgatcgtgaaaaatgacccccggagaacccccgaagaagaaacacatgaagactgatgttttttgaaaggagtgtccctatgacattttccgaagcattctacggcacgtacaaactcgacaaaaaagacggcaagccgcacttaaaggagcgtatttttgccccggtggacggcttttggagcggcgtcatgatctttggcggtgtggtcggcacgatcattctgctcttgacctttgccgcacacgtgcaggtcgccctcggcaccttcgcgcacccggccgaaaacggcgcgctcacgcccgatgcacagtatacgctgtggggcgtgctcgtcgcgttcatctttgcgtttttcgtgctcgccattccgcgctggttcctctgccgcggcaccatgcagttcagcttcatcggcgcatttctcatcctgctcgcggcgcagctcatctccgcgttcagcctgaacaacacgacacccgatgtcggcaatgtgctgtgggtcatcgtaacgggccttctgctcgtgttcctcatcacctgcgccgtgtgcaccgtttcggcgggcctaaccgcgctcgtgaactacttcatcgcgaagtaccgtatggcgcatgcaaagcctgtcaccacataaacgcatgatgaccataacctgactttttcacagatcggcgaatatagaaagccgtgctgtcgccctaataggggggggtaacagcacggcttatttttcagttttcaaaccttttcttcatatctcaacagacgccaagaaaatctcataggcatcgttaaaagagtcatacggcgtagggttgccgccgtttgtgctcttgcactggttgtcggagtattcctcgcccacagccaaaagctcgccggggtaaagctccacgcccgcttcccgcgccagcgcacaaaacgagagaatcggctccttgttttcgcgcgttttaagcagagctttgcgcaaagtctcgtccttttttgcaagctccgtcaacctttcgagcttttcaaatgtgttcataagcgcccctcgcttcaccaaatggataaattcagtttagcaaagttcggggtcgttgtcaaacgctgttttcaggcaagcggaaagccgctccgtctccgcccgcacagctcgggagaatccacctatacgctcatcaaaaatcatcacatctccagctccatcatcgataagctgcgtcataataagccgctcaacaccaccacaatcaacgacctctgccgcatcttaagctgcaaagtggaagacatcctcctctacattcccagcgatgacgaccagatcttataaagcaaaccccgggtataccgagccataagaacagtccatatatcccgggatcctattttatgcaaaaatgctcccgatcatgcgaccgggagcactttttatgctttaatatgcgattttcagaagcaactcttacttggaagcctcttcaacagcaacagcgcaagcaacggttgcaccgaccatcgggttgttgcccatgccgatgagacccatcatctcaacgtgtgccggaacagaggaggaacctgcgaactgtgcatcggagtgcatacggcccatggtatcggtcatgccgtaagaggaaggaccggcagccatgttatccggatgcagcgtacggcctgtgccgccgccggaagcaacggagaagtacttcacgccgttctcattgcaccacttcttgtaggtacctgcaaccgggtgctggaatctggtcgggttcgtggagttaccggtgatggaaacgccgacgttctcgagcttcatgattgcaacgccttccggaacgttatctgcgccgtagcacttaacgtccgcacgcgggccgttggaataagccttttcgctgacaaccttaacttcttctgcgtacggatcgaactcggtctcaacatacgtaaagccgttgattctggagatgatgaacgcagcgtccttgccgagaccgttgaggataacgcgcagcggcttcgttctgaccttgttcgcgttcagagcgatcttgatagcaccctcagcagccgcgaaggactcgtggccggcaaggaatgcgaagcactcggtctcctcggaaaggagcattttgcccagattgccgtggccgaggccgaccttacggttttcagcaacagagcccgggatgcagaatgcctgcaggccgatgccgatagcggcagcagcgtcagcagccttcgtgcagcccatcttgatagcaatcgcgcagcctacggtgtaagcccactttgcgttctcaaagcagatcggctgtgtttcctgtacgatggtgtacgggtcgatgcccttctcttcgcagatggtcttgcactcatcaatggaattgatgccgtattctttcaggacggagaggattttcgcctcacgtctctcataaccttcaaatgtagccatttctcgtgccctccttattccttgcgcgggtcgatgtacttaacggcctcattgaatctgccgtatgtacccatagacttcttgtacgcctcgttcggctccatgccggccttgatgaagtcggtcatcttgccgagggaaacgaactcgtagccgataacctggtcgtcagcgtcgagtgccattctggtgcagtagccttcggtcatctcaagataacgaacgccctttgcctttgtgccgtacatggtaccgaccatggagcgtgcgcccttaccaaggtcttccatgcctgcgccgataacaagaccgccctcggagaaagcagactgggaacggccataaacgatctggaggaacagctcgcgcatagcggtgttaatcgcatcacatacaaggtccgtgttcagagcttccataacggtcttgcccgggaggatctctgctgccattgcagcggagtgcgtcatgccggagcagccgacggtctcaacgagcgcttcctcaatgatgccgtccttaacgttcagggagagcttgcaagcgccctgctgcggtgcacaccagcctacaccgtgggtgtaaccggaaatgtccttaacttcctttgcctgtacccacttgccctcttccgggatgggagccggaccgtgcttcgggcccttggctacaatacacatctcttccacttctttggaataattcataagtggtactcctttcggttccagttttatttggcagacttcgcgcaaaagagagccgcagcgaaaaagcgccgcccgcatcccgcaaaaagccattttactgattttcttcattatagctttttttcatgcgtttcgcaaggggcaaaacacacatttcgcgaaaaaagcgcacaatatacgcaaaaaggagcgccgcagcgccccttttgtatcttatttcggtttgaaattacttccaaagcgggtcgggatatgtgccgttttgcatcatctcggcaagcgccgccatcacgacgggcttatcggccttatacgtcacgccgaaccacttgtccgccgattttaaaaccgtcacgtctgccttgccgtcgcgaatctggtcgttgacgacaaacggcaggaagtattccgctttcagtgggttcttcggtacatcgttctcaaggaacgagacgaaatcctttttcaatgcgtctacaaagtccggcgtaaagccccacaggttcatggaaacggtcgtgtcctcatcgagcgcgtgccacgttgcgccgtcgtcctcggtgtaagccgggccgtcctcgcgcttttcaatgtgcgtgcgctccacgatggtatccaacacaccgtctttctccacgcatacgccgcgtgccacatggccgttttcggtcagcgtgtttttcagatggtaacccaccatcgcccagtgtgccttttcgccgttttccttcacgttccggaggaacgcgccgatcttcttaaacgcctcgccgccatagaaatcgtctgcgttgatgacgacaaacggcgcatcaatgtggtcgcgtgccgccaaaacggcgtggcccgtgccccacggcttctcgcggccttccggcaccgtaaagccctccggcaggtcatccaacttctggaaaacatattcgacctgcacgtacttcgatacgcggtcgccgataacctctttaaagtcctcaaaaagctgctccttgatgatgaagattaccttggaaaagcccgcctgcgcggcatcaaaaacagaaaaatccatgataatctcgccgtttttgccaacgggatcgatctgcttcaagccgccgtaacggctgcccataccggccgccataacgactaaaatcggttttttcatagctaaattgtcctttctcgtctgcggcatcacaccgccatatgtacaggttcggtcacgcgatcgtcaggggtcagttttcatcctcgtaaataaattcgtggatatgctgtgccgcaacatcggtgtcatacgtccacatccaaccgccgccctcgcagtaatcggaggcatagccctccacatcactcgggatggaaaggcgctcaatgtcaaaacccgtcagcgcaatctgcgccaggccgatcatcttatcaaacgtcaaagaagtctcgcaaagcggcgcaagctgttgaatgatgctcgggtattcaagcttggaaatagaacttgccttgctcaagagcgcagaaagcacttcctgctggcgttccacacggccgttatcgttgtcgatggcacgaatacgcccgtaagccacagcctcgtcgccgttcaagagcacgccatcgcccgccgaaagcggcgcatatgtagaaacatcgcctgccattgattcaggggattccgccgccaacgcatacatatttttgttgatctcactgatttcatcttccgtcaaatcaatattcacaccgccgaacgcatccacaatcttcgccatggaggcaaaattcacggtcacgtagccctgaatatcgaggccgaagttctggttgatcgtgcggatggcctgctccgggccaccgtacatataggcatggttcagcttatcatagccggaatcatacggactgccgtcgcccatatacacgcgcacatcgcgcatgatggacgtcagcttaaccttgtggtgcacgttatcgatcgacatcaccataatggcgtcgctgcgcccagcaaaggtaccgccgtcgtaatcgcgggcatccacgccgaacagcgcaatattcgtaatgcccgcttccgattttgtttcttcggaaataccgagttccgtcttgtctttcgtgatggtcgtcgtcttcaggtcgcccaaaagcaccgtggaagcgtagatcatcacgccgcccaccagcaccaaaataacgcagatgaagctcaaaaagaccttaaggcccgtccgttttttctttttttgatttttcttatacgcctgctttgaggagtaactggaaatatcctgaaactcatcgcggcgttgttttcttttcgccataaaagcctccgtctcggccaaaggccggatgtctttatcttataaattatattcccataacctcgtttcgtcaatttactttttcttacgaaaaacgaccagtttgcttaaaatataatttgcaaggatcacaaaaacgttcgcaacgagcttcacaatcttatcgttcacgtgcagcagatccacaccgatgaacatcatgcccatttccataagaccggacgcaatacggctcgcaaaaaatttcgccgcctccgtcaaaatcggcacaaagccgtgcgcacggctctcaaacacccacttgcggttcgtcacatacgcaaaggtaactgaaagcacccacgaaagcgctgtcgataccatgtacgggatgtgcagaaaatccgtaaagatccagtaagaagcgtagctcacgaccgtcgtaagcacgccgaacaccacgtacaaaaccggctctttgtattttataagcagttctttgatttttcccatattttctatcctttatgtttcgggcaaagcgccctcttctttcttatgataaatattcttccacgccgtgcgccgccaccgcgccgtccgcagccgccgtcacgatttgccgcagcgtctttttacgacagtcgcccgcagcaaacacacccggaacgttcgtcttcgtgctctcgcccgccataaaatacccgttttcgtcaaggtcaagaatatcacgtacgaagcccgtcgccggcacattgcccaccgccacaaacacgccgttcaccgcaatctcgcacacctcgtccgtctttacattgcgcagacgcagcccgccgacttttccgtctttttcgaggatctcatccgtcaccgtatcgaaaacgatctcgatatttggcttatcgagcttcttctcatagctctttgaagcgcgcaggcggtctcttctgtggatgagatatacctttttgcacatcgcggagagaaaggccgcatcgcccgccgccgtgtcaccgccgccaatgaccgcaaccgtcttatctttataaaacgcgccgtcgcatgtcgcgcaataggaaacgcccttgccgcgcaaagcgtcttcgttcggcaagccgagcgtcctcggtgccgcaccgggtgccaaaacgacgcttttcgcgcggtaagccgtgccgtcttccgtctccagaattttcacatcaccgtctaaccgcagtaccttaacgttgccgtaggtctgcttcgcgccaaagcgctccgcctgctttttcatgttcatcgtcagtgtaaacccgtccaccgcctccgggaagccggggtaattttcaatttcattcgaggtcaccatttgaccgccggggatgtatttttccagcaccagcgtctcgtagcccgcgcgggcgcagtacagtgccgccgtaagccccgcagggccggaacccactacaatcacgtcataggccttttccatgttttcgctcataagtcaccgctccttttcctgatgaagtgcagcttttctgcataccgtcttgcgaacatcgttagtatagcacattctcccgaaaaatacaattccgtgcggcgcgaaagagttttctaccgcaaagcgacacgcagtcgaaaactttatcaaaatcaaatacatactcccgttctcctacttaaaccaaaaaacacgcaaaccgcgctccttacacgacatccctcctatcgcacaaaacaaaagaggctctttcagcatcccgaaaaagcctctcgttctttactttttattgcacatcttgtgcggtgtacgctcagcgcacacatctcatgttaatttaaactgatactaatacatcggactttcctctgcttgaaaccatcggtctctttttatacctgcactctgcattactttcagaatgtcgtcggtctttcagagtttatcatttgtgcattggacacaactccatgtatattctcaaaactgtatttgattttttctttggcgttttccgcctgtccttacacacgtccgtacactttgtacagcccatgtataattctatatgttaatttcgacctacttatctttgctgtaccacgaaaacctttttgggactcgcttttgcgatcccgcgctttcataaagcttgaaacactcgtgtgcaaatattcagtctacttcagggatccgaggcgcaacgcaccacggatcttctgctgctgaggttcagtagccattggcctcacccgctttctttcaatagatttgcctttgcggctcatgcagctttgcctcttttcacgttttgcctgtttccacatgttcaaaacgtacggctgcttctttatttatgttcccgtttctccgcttcggctttttgtccctttgtaccggcacattcttaaaagcctacttatctctttcatcacatttcccggaagccgaagaacatttgaagctccgcctttgcaaatactgcctcaagagtttcctccgcgcctttctctctccccttcggaatactttccgcgcgctgaaccgcttcgatcttttaccgagacttttttgagcctccaccaagaaaacctcttacggttttcccgatctactttgcgttctggagttctttctcttttcacctatatattagcaccatccgtctactttgtcaacagtttttttgaagattttattttttatttgtatattctgttttcgcaaaatgaagcttgacattcttccgcattcacgatacaattattcttgcaggcaaaagcaatgggcttattttccacagcttttctgctccgccgcataaattacagaacggcgaatatactgagaaagaaggcttttcccatgagtatagacaacaatcaggaatacgaagcagagctcatcaccctcatcgacgatgaaggcacggagcacgaatttgagatcatcgacgaactcgagaacgatgacggctactttatggcacttgtccccactctgcgcgacgcccaaagcgaagttgcagacgcagatgagtactacatctttgaagtcgtagaagacgagaacggcgaagagcagctttgcgagatcgaagacgacgacctgctggataagctcgccgaaattttcgagacccgctatgcacaggctatggaggaagaagaggagtaattttctttccccgttcaagatcatgtaaagacacctgcccgatgcgcggaccgtgcaaaataaccctacactcaacttttagggagctcggctccgcaggcggactgcagacctcccggcccggcttgaccggataccggaggaagggagcgcgaaacctgcgggagggcacccacctgcttattacgtagcaggttattgagagcacgttacggtcgggcggggttttttatgcccatttcaaggcggtgaaaaccgccttttttcatactttacacacctttttctgtgcttttcttttggaaacggttgtattttgcaaattttgccgcatttgggtgcggtagcaaagaaggagaaggtcatcatgaccagaaaacagtatttttcaagcggactcaaagacggcatgcccatttgcttcgggtactttgccgtttcgttcgcgtttggcattcaggccgcgggcatcggactttcggtgtttgaagcctccgtactctccgccctaaacgtcacctccgccgggcaattcgcagcactcgccatcatcgcatcgggcgcgtcgctcatcgagctcgcattcacgcaactcatcatcaacctgcggtattttctcatgtcgtgtgcgctctcgcaaaagctctcgccaagcctgccccttgggcaccgcctcggcatcgcctacggcatgacggatgagatcttcgccgtcagcgtcagccaaagggagcctctctcaccattttacagctatgggctcatcgccgtcgccattccgggctgggtgctcggcacggcactcggcgcggcggcgggcaacattctgccgaccgttttgacgaacgcgctcggcatcgcgatctacggtatgttcattgccatcatcctgccgcctgcaaaagagaaccgcgttgtcgccggtgtggtcgtcctttccatggtgctttccgcactgttcacgtatctgccggtgctgtgcaacatttcctcgggcttccgcatcattgtcatcacgcttatcaccgcaggcggtgcagcactgctgttccccatcccggatgagcccgcagaaccggaaaaggagatgccgcatgagggttgaggttttcctttacatactcgttatggcggccgttacgtatcttatccgcatgctgccgctgacgctcatccgccgcaagatcacaaaccgcacactgcgctcgtttctctattatgtgccgtacgccacgctttccgccatgaccttcccggcaattctcactgccaccggcagcgccatcagcgccgcgctcggctttgccgccgctttgattttagcattccgcggtaaaagcctgctcaccgtcgccattatcgccagcgccaccgtgcttgtgtgtgaactcatattgccatatctgccgctgtaaagcacagtttgcaacgtaaaagtttcgcccgcctttttcaataggcgggcgaaacttttaactatcgttatagaaagccttgtgtttactctctctcaaaatgctttgcgaccgtctgcaagtactcgatgatcggcaaatgctgcggacatacaccctcgcactggccgcactgaatgcacgcgctcgctttgccgaagtgctttgcgacgttctcgtaatactcgccctgcggcgtccagccctcgtccggagtgattcctctgccgcgcagctcctgcatatcggcgttgtacagcgagaaatacttcgggattgcaatctgcatcgggcagccgtccgtgcagtacgaacagcccgtacacggaatatcgatgctcgcgttgatgatgtccgtcgcctttttgatgagcgctttttcctcatcgttcagcggcttaagatcctgcatgtacgatgtgttgtccaaaagctggtccatatcgctcatgccggaaagcacgatcttcacgttcggcaggctcgctgcgaaacgaattgcccaagacggtacggaagcttctgaattatagtccttaaacagcttcgtcacttcttccggcacgtttgcgagcgtgccgcccttcaccggctccatgacgaataccggcacgccgtgcttttcagcaacttcgtagcattttctggactgcacaccggcgctttcccagtcgaggtagttgagctgtaactgcacaaactcaaactcggggtgcgcggtcagcacttcgtccaacagctccgggccgtcgtggaacgagaagccgatgtgctttacaaggcccttttctttcttgtcgcggatccagccgaagcaatcgaacttattgtacgtctcaatgctatggcagttgatgtcgtggatgaggtagtaatcaaaatatgttacgcccgtcttttccatctgctcattaaaaatgcggtcgcggtcttcaaacgaattcacgaatgacgaatgcagctttgtcgtcagcgtgaagctgtcgcgcggatggcgggaaacaagtgcttccttcacggcgttttcgctcttgaatgcgcagtacatccacgccgtgtcaaaatacgtgaagccgcgctcgatgaacgtatccaccattttcttgacctgctcaatgtcgatcttgcccgggtcgttcgggtccagagacggcagacgcatgaggccgaagcctaatttctttccagacattttactcatactccttatgtaaaaaattccaagcattttgcttcttatatcttacaacttaaagtgcactctaagtcaagcttttttgtaaaattatttttccgcctcgaaatattcctcccgcagtagcgaaaactgcatgtcgtcgcggatttcgctttctgacgtacgcacgcagcggcggatacacccttcatacacaaaccccaaagatctcagcaacttttccgaagcaatattccccgtgaaaacacgcgctgctacaacttccagatcttcttcggtgaatagttcatgcagcacagcccgcagtgcttctttcatatagccctgccgcgtatattgctccccgagataatacgaaagacatctcgagcgcacatcgaaccgaacaccgtcctcctccgccacaatcataccaagcaaagcgccgtcctcttttcgctcaatataccatgtgtcttcataatcgatttccctatgaatcaaatgaaccatctgctctttatcaaacacttccattacgttgtttttcattacgaaagcgctgttgtgtatggccatgatctccgccgcatctctctcccgcggcgtgcgcagtaaaagtctttctgtgtgcagttctctcatattttccctgcctttctttgccgtgtgtacgtatttcggataaaaaacaccctttcctccatgaaccacggaagaaagggtgcgaaaatcaattcagtcttttgctgcatgatgcagcgtcaaaacacctgatttttccagcgcctaagccgaaattagatctcagcgaagtacttgatggttctgaccatctggctggtgtaggagttctcgttgtcgtaccaagaaacgacctgaacctcatagaggtcgtcagcaatcttggagaccatcgtctgggtagcatcgaacagggaaccgaatctcatgccgataacatcggaagaaacgatcggatcgcagttgtagccgaagctctcagaggaagctgccttcatagctgcgttgatgccgtcgacggttacgtcagcgcccttaacaacagcggtgaggatggtggtggaaccggtcggaaccggaacacgctgtgcggaaccgatgagcttaccgttcagctccgggataacaaggccgatagcctttgcagcgcccgtggagttcggaacgatgttagcagcgccggcacgtgcacggcggaggtcaccctttctgtgcgggccgtcgaggatcatctggtcgccggtgtaagcgtggatcgtgctcatgatgccgctctggatcggagcataatcgttcagtgccttcgccatcggagcgaggcagttcgtggtgcaggaagcagcggagatgatggtgtcatcagccgtcagggtcttctcgtttacgctgtaaacgatcgtcgggagatcgttgcctgccggagcggaaataacgaccttctttgcgcctgcgtcgatgtgagcctggctcttagccttagaggtgtagaagccggtgcactcaagaacaacgtcaacaccgatctcgccccacggaaggtccttagcgtccttctcagcgtagatcttcagggtcttgccgtcaactgtgatggtgttagcctcgtcgtcagcggaaaccgtgtggagagcttcgccgatcttgccgcagtaaccgccctgtgcggtgtcatacttgagcaggtgagccagcatggagggcttcgtcagatcgttgatcgcaacgacctcataaccctcagcgccgaacatctgtctgaacgccagacggccgatacggccgaaaccattgattgcaactttaactgccatgattgtatacctcctgataattgtggatgcataatttgcaattctattttatagcatttcgcaggattttacaagggctaactgctaaaaatgcaaactttttccgtaattttcagaaaatttacgcgtttcccgtgtcttttaaagcattttcttctaaattgctctccgctttcgcagaaacgcgctgcccgctcaccgtaagcagcaggcaaaggctgtgaacagaaaggcacagcatcgcaagctggatcacatacggcatctccgtcgcatacccgcgccccgcaatgatgagcactgtgttcgagatcacatacgtcatccaaagcaccgccgccggcaggccgaacacatacgtgctgcgcagcgcctttttgccgcccgcgccggagagcagcttgccttcggaaagcaggaacagcagcatcatcgcaccgccacccacggtaaagatattctcctccgtcgtcgccacagcggaatacgtcatgaacgtcacgatcatatacgaaatgccccaaacggaaccgatggcccaaagcccgcccgtgccgctcgggaagccctcgcccgtcagccatataatggcaaaaatgagagaaacgatcgcgaaaagcaacgttaagaccgcaaacggcaaatgcgtcgtcacatgcgaagcctgcacaaagtaggtcggctgattgttgcggtataagtaaaagtcccgcagaagcgctgccgcacacaaaaacaaaaatacacacatcagaagcgcagaagcacccgccgccacatttcttttcgtctctatgcgcgcgcaaagctttttgtccacacggcacaaaagcatgcagagaagcgatacgccgatcgccgcaccgcagtaaatatacgtcaacagtccgctgtccgtcacaaagcccgtgtcataatcaaaaaagcagagcatctgcacgcagcgcagcgcagccgccgcaaagatgccgattcctgccaaaacaaacgccaatttcactttcttattcatatatcatacaccgcccacaccctcggggctttcctttcatcgattcattcgccgtccgaatttgcggcacatcggttcactgtgttttattttagcacattccgcctaagatgaaaacaccccgcaaaaaagatttttaatttcctgttgacaacaaactttcaagtgattataatatatgccagagtaaacaattaagcgcatgattgtttacataggagcagattcgattttgctgtacggcggggccttctccccgcgaaaacagatgaaaggatggtaacaatgcacgatcacgaaaaagagcccatcggccatgcattgcatgtgctggataccaccatgcgccggtatattgatacgtattcccataaaaaggaacacgaaaacctcaccggcacaaacacatgggtcatccagttcatcgccgatcacaaagacgggcccgtgtatttgcgcgatattgagcgccgcttcggcattacacgttccaccgcctccaaagtggtggatatgcttgtgcgaaacggttttgtggagcgccacaccggcgaaacggacgcccgcctgcgtcgtctgaccctgacggaaaagtcagaaaaccttttggccgatatccgcgccgaccacgaagcaatggaagccgttttaacgaaaggcttcacgcaaaatgaaaaagaaaccatgctcacttatttacggcgcgcaaaaataaatgtagatgctgcctttgccgaaaagcagcagaagaaagaaaggagcggtgcagatggttaaaaaactgatggaaagcatccgcgaacagaaaaagaattccatattggccatggtcaccatcagcggtgaggtcgtcttcgaggtcatcatcccgcttttgatggcgaatctcatcgattacggcattgacatgggcgatatggggtacattgtcaaaatgggcattgtcctgttgctctccgcactgggtcagcttttctgcggtgccatttccggtaaattcgcagccattgcctccagtggctttgcccgcaacctgcgccacgacatgttctacaaggtgcagaattattcattctcaaacatcgataagttttccaccgcaagtatcgtcacacgtctgacaacagacgttacgaatctgcaaaacacttaccaaatgatcatccgcatggcggtacgcagcccgcttatggcgatcttctcgcttgtcgcggcattcggcatcgacaccaagctctcgcttatcttccttgccatcatcccggtgctcgttctcggcctgtacttcatcatgacgagaacgcacccgatcttcgagcgcgtgttcagaacttatgataagctgaacagcgttgtgcaggagaacctgcacggcatccgcgtggtaaagtcctttgtccgtgaagattacgaaaataagaagttcaccgccatttccgaaaatatctataaggacttcaaaaaagccgagcagcagctcgcatggaacgctccactgatgcagctttgcatgtacgcggcggtgctcctgctctcctggttcggcgcacgcaccattgttgcttgcggcggtgacgcagcgaccggtctttctaccggcgagcttctgagcctgctgtcttacgccacgcagattctcatgagcctcatgggcctctctatgatcttcgttatgctcaccatgtcccgtacctccggcgagcgtgtcgttgagctgctcaacgagaccccggacatcaccacccccgaaaatgccgtaaagagcgttccggacggcagcatcgatttcgagcacgtccagttcagctatcgtcacggcacagagggcaagcccgtgctttccgatattaatctgcacattccggcaggcgccacggtcggcgtcatcggcggcaccggctcctccaaatcgagcttcgtgcagctcatcccgcgcctgtacgatgttgatctcggcgcggtcaaagtcggcggcatcgacgtccgcaaatacgacctggataccctccgcggcgacgtcgccatggtgctgcaaaagaacgtcctgttctccggcaccatcaaggataacctgcgctggggcgatgaaaatgccaccgacgaggagatccgccatgcctgtcagctcgcacaggccgatgacttcattcaaaccttccctaaaggctacgatacctacattgagcagggcggcacgaatgtctccggcggccagaagcagcgcctctgcatcgcgcgtgcgctgctaaaaaaaccgaagattctcattctggacgactccaccagcgcggtcgatacccgcacggatgcgcttatccgcggcgcgttcgcaaaggagatcccgaacacgacaaagatcatcatcgcccagcgcatcgcctccgtacagggagccgatatgatccttgtcttagatgatggcaagatcgtcagctgcggcacgcataacgagctcatgcaaacaagtccgatctaccgcgaagtttatgaatcccagacgaaaggagatcctgacaatgccaccgcgtcctaatggtcccagactctccatgaaagaaagcatgaagcagctcgataagaagaccttattccgcctgctttcctatatgaaaccgtacaggctgcaccttgtgttcgtgttcatctgcattgcggtgagcgctttcgcaagcgtcatgtcctccctgtttttaaagtccctcattgatgattacatctccccgctcctgctcgaatccaatccgaactttagcggtcttctgtatgcgctgctccaaatggcagtcatttacgtcatcggcgcgttctctacgctgttctacaaccgcaccatggcagttgtttcacagggcacgttaaagaaaattcgtgacgagatgttcgagcacatgcagacgctgcccatcaagttctttgatacgcacacccacggcgacatcatgagcttctacacaaacgatacggacaccctgcgccagatgatttcccagagcattccgcagacgctttcttccatcttcacggtcgtttccgtgttctgttctatgttaacgctcagcatttggctcaccctgttcctgatcgcgttcctctttgtcatgttcaaaatcgtcggcaaggtcaccgcaaaaagcggcagctattttgttcgccagcagcaatccctcggcaatgtgaacggctacatcgaagaaatgatcaacggccagaaggtcatcaaggtcttctgccacgaagacaaaacaaaggtcgagttcgacaaacgaaacgacgacctcttcacaaacgcttccgaagccaataagttcgccaatatcctcggccccatcatgaacgcactcggctacttcctttacgtgctcatcgccgtgcttggcggcggtctcgcacttgcaggcgtaccgaacctgaccctcaccggcatgggtatcatgacgctcggcggcatcgcatcattcttacagctctcccgcagcttcgttatgccgatcagtcaggtcacgcagcagatctcgtccatcatcatggctatggcaggcgcttcccgcatcttctctctgctcgatgccgagagcgaaaaggacgagggctacgtcacgctcgtcaacgccgaaaagaaaaacggcgtgctcaccgaaaccgacaagcacaccggcctttgggcatggaagcatccgcataaggacggcacggtcacctatacggagctcaccggtcacgtagagcttgaggacgtcgattttggttataccccggagaagaccgtcctgcatgacatcacgctttacgcagaacccggccagaaggtcgcgttcgtcggcgcaacgggcgcaggcaaaacgaccatcacaaacctcatcaaccgcttctatgacatttctgacggcaagatccgctacgacggcatcaacatcacgaagatcaagaagccggatctccgccgttccctcggcgtggttttgcaggacgtcaacctgttcaccggcaccgttatggagaatatccgctacggtaagctcgatgccacagacgaagagtgcatcgccgccgcaaagctcgcaaacgccgacggcttcattcgcatgctgccgcagggctatgacaccgttctttccggcgacggcagcggcctctcacagggccagcgccagctcatttccatcgcccgcgccgccgttgcagacccgcccgtcatgattcttgacgaagcgacgtcctccatcgatacccgcacggaagccatcgtgcagtccggcatggacgccttgatgaaaggccgcaccgtgttcgtcatcgcgcaccgcctatcgacggtccagaactccgacgtcatcatggtgctcgaccacggccacatcatcgaacgtggcagccaccgcgacctcatcgcccaaaagggtacatattaccgcctctataccggcgcttttgaactcgaataggacgaatttaacttcataacctccaatttgcaaaagctccggctgccgaatgtaccgttcgcagccggagcttttccgtttataagatttcaatatacgttttgtaaaagtcatacgttttcccgttttcctgcgcgcacgttaaaaagcggctgataacataccctgttttatatatcctttgaatttccgcaagatgtatctctaaatcattcggatatccgtccgcaatttcctctttcatcaaacaaacgacatacttgccaccattgtttttccaaagtgtatttttgtaattctcaacttctttacggctgcacgtaacactcaggcctctctgttcctgttccatacaagaagaatgttgaactctcgaataaacgtatgggttttgaatatatcttttcagtttctcgatttctatcaattcaaaaggtacaatacagtccgcatcgactttttcttccgtatatggacgctcttgcagtttgcagatcatctctaaagcttcaatatgaaactgaagctttttcattctctgttctaaagccaattgctgctgccggattgtttttgcttgttgcacacacaaatcctgatgtgcctgcaaatccattttctccatgtcccgaatttttttaagcgggataccaaggtttttataaaaaagaatatccgaaatcgtcatcaaatccgacactgtgtatatacgatatccattctccgggttctttttggcagccagcacccccatctcttcccaatagcgcagcgttgaagctggaacattaaagaactttgatatttcattgatttgaaatccgtctttcacctaaaaatcctccggaacacagtttcaataattataacaaacaaatccttgacattcaagtatctttaagctttatactgtaaagcatggaggtaccaatatgaatagttcatctgtcttttttgctaaaaacgatattcgtttccgtaaaattctgctgtttgttcttccaacctatttgacaacgctattcaatacgctgtatacgattgtagatggtatgttcgtttccaaatatgtcggaacaaacgcattggcagccattaacattgtatatcccattgtaaacgtccttaccggtattgcattaatgtttgccaccggcggaagcagcttagctgccatttctgcgggcgctaaaaacaacgagcaagcaaatcaagaattcacactcagcattattttctctcttgctatcggaaccacagtttcacttgctattgcttttaatttatctcgggttctgacttttctcggtgccaccccgctgattttggacgattgcaaaacatatgcattgatctggctcattggcgttcctgcggtcatcggcaaagaactgctcacctactttatccgcatgtcgggttcgcccgggtacagcttttttctttcaatatccggcggcatatccaatattctgttagattatatttttgtcgcacaaatgaaaatgggagttttgggtgccggattagcaactttattcggacttttcttatctgttatcttcggcatactttattttccgtgccgtaacacaagcctgataccaactttcaaacatttgaaattcaaaacagggtttcggtgtgctgttaacgggttttcagaatttattgaccaaatcgccatcgctatcaccactgttatttttaatcgagccgcgctttcttttgcgggtgaagacggaattgcttctgtatctataattatgtacctgcaatttctgttcatcggcatttattttggttacgcttccggggtatcgccgcttttgagttatgcatacggaaataagtccgatcacatatgcaaaaagctggaaaactatgcccgctgtttctttattgttgcacctctaattctatatattgtcgcttattgcacatctcctctgactgtttcctgctttactgagccggaaacaacggttttttcactcgcattaaacggaatgcgactttacggaattggttatcttttttccggtttcaacatctacgccacaattcggttaacttcttatggaaaaggtcattattctgccattattacactgctgagatcattcatattgcttctcctttttctgtattttcttccgaattatctgcaactcaacggtgtatggctcgccatgccggcggcagaatttctaactctattcgttacactgtatataaaccataaattcaagcatattctttgataagaactcaaaataaaaggacgagcctcgttcacttttcggaacaaggctcattcttttatactcgtatattcggttatttcgttttgccgatgtcatgacggtaatgcgcaccgtcaaaatggattttctccacagctgcatacgccctttcgagcgcttcgtccagcgttttagccgtcgcggtcacgccaagcacgcggccgccgttcgtcagcagcttaccgttttcaagcttcgtgccggcatggtacaccgttacgccttccgcctgaccgttttcgtcaagaccggtaatttccagtcccttcgggtaagactgcgggtagccgccgctcgccatcacgacgcacgcgcacgcttccggaatccattcaatctcaagctcgtcgagcttctcgtcgatgaccgcgttgatgacgtccacaaaatcggtcttgaggcgtggcagcacgacctgcgtctccgggtcgccgaagcgcgcgttgtactcaatgaccttcgggccgtccggggtcagcatcagaccgaagtacaaacagcccttaaacggtctgccctctgcctgcatcgctttgacggtcggcaggaaaatggttttcatacactcgtccgcaatttcgttcgtgtaatacgggttcgggctgatggtacccatgccgccggtgttcaggcccttgtcgccgtccagtgcacgcttgtggtctttagaggacaccatcgggcgcagcgtcttgccgtccgtaaatgccaacacggaaacctccgggccggtcaggaattcctccacaacaacgttgttgccggaagcgccgaacaccttgtcttccatgatggtgtgcacggcatccttcgcctcgtcaaagttttgcgcgatgataacacccttgccgagcgccaagccgtctgccttaatgacaaccgggaacttgccgcgcttttccacgtactctacgacctctttcgggtcggagaacaccgcgtaatccgccgtcggaataccgtatttcttcatcagattttttgagaacaccttgctgctctcgatgatggccgcattcgcgcgcggaccaaatgcacggatgccctctttttcgagcgcatctaccataccggccgcaagcgggtcatccggcgcaacaaacacaaggtcaactgcgtttttcttcgcgaaatccacaacgccgtcaatgtccatcgcgttaatggccacgcactcggcgtctgccgcaatgccgccgttgcccggtgcgcaccacagcttttccgttttagggctctctttcagcttgcggatgatcgcatgctcacgtccgccgctgccgataaccagaatattcataataaaagcacctcgcctttcggatcaatggtggaacagacggatgcccgtgaatgccatggcgatgccatacttgttgcacgtatcgatgacgttgtcgtcgcggatagagccgcccggctgcgcaataaattctacaccgctcttgtgtgcgcgctcaatgttgtcgccgaacgggaagaacgcgtcgctgcccacggaaacgcccttaaacgtcgcaagccaagctactttctcctcgcgggtgaacacctccggcttctcggtgaaaaactgctgccaaacaccgtcgcgcagcacgtcgtcatgctcctcactgatgtacacgtcaatggtgttgtcgcggtcaggacggcggatgccctccttaaacggcagattcagcaccttctcgtgctgacgcagataccagatgtccgccttgttgcccgcaagacgcgtgcagtggatgcggctctgctggccggcgccgatgccgatggcctgaccgtccttcgcatagcagacggagttcgactgcgtgtatttcaacgtgatgagggagagcactaagtcaagctttgcgtcctccggaatctctttgttttccgtcacaagatttgtcagcatgtccgcgtcgattttcagctcgtttctgccctgctcaaacgtgatgccgaaaacatccttgtgctcaatcggctccggcttgtaatccgggtcgatctcgacgacattgtacgtgcccttacgttttgtctttaaaatcgcaagcgcttcgtccgtgtagcccggtgcaatgatgccgtcggaaacttcacgtgccaacagcgttgcggtttccttatcgcatacgtcggaaagcgctgcccaatcgccgtaggaggacattctgtctgcaccgcgggctcttgcatacgccgtcgcgatgggcgaaagctccagatcgtccacaaaataaatctttttcagcgtgtcgctcatcggctttgccacagctgcgcccgccgggctcacgtgcttaaaggaagccgccgccggcatgccggttgccgctttcagctcttttacaagctgccaggagttgaacgcatccaaaaggttgatatagcccggtctgccgttcaaaacgcgaatcggcaggtcgcgaccgtcgttcgtaaaaattttcgccggcttctggttcgggttgcagccgtatttcagttccagttctttcatagtttcccctccgaaaaatcacttatttttgttgacgatgcgggtctcaatcttgcccgtcttcaaattgatgaagcgcgtgaacaaggaaaccttgttgtcttcgttcaggttcgtccacaggtcattcgtaaacgtgtcgatgtcgccctcaatcttcaccggcttcggctcgccctcaaaggacgggatacgcggtgcgccgtcacacttatacgtgtggatgaagtggccgaggccgtccaccggcgtatagtcgaagaaaaagctctgcggcgcgtccgggttgccctcgcagctcttcaaaatggaaagcttataggtaaagtcgccgtccttcagctttacaaggccggaaattctcggcgtaaagttcggggcgtccggctcaaacttgcgggtcttcaacgcttttttgaagctcttgcccgccttgaggtatgtaaacacggtatccgtctggtctccgttcgtcacaatggtcttgtttgccaaaacgcgcaccggcgcataaatgacaagggacgggtcagaaagctttgcggggtcaaacgcttccgtgcggatgccgtcgccctgctccacaaacacgcggttgcgggagttcacgctgcggcccataatgaaatacgcgatgaccgcatgcacgccgtccgcgcttttgccgatgacgatgccgcggcccgggtatgcgttgcctgcaagttcctttttaatatccagaatttccatgtatccgtttcctttctatgtaaagggataaattattctttaatcgtaacgatagagccattcacggaaagcttacccgcgcagaacaaagacactgcctgcggcagaatcttccactccgcctgctccataatgcggcgctgcagcgtctcgggcgtatcgccctgctccaccggcaccgctttctgtaagatgatcgggccgccgtcgcacacctcgtttacaaagtgtaccgtcgcgccggagaccttcacgccgcgtgccaaagccgcctcgtgcacgtgcagaccgtaatagcccttgccacagaacgacggaatgagcgccgggtgcacgttgatgatcttattttcaaacgccttcgtgaacttctcgttcgtaatggtcataaagcccgccagaacaattaagtccgtgtgcttttttttcagcaagttttcgagcgcttcgctgtacgcgtccacgttttcatagtcgctgcgcgccagcacaatgccctcaatgcccgcgtttttcgcgcgctccaaggcataaacgcccggcttgctcgccacaaccacggaaattttgccgttttcgattttaccggctttctccgcgtcgatcagcgcctgcaaattcgttccgccgccggaaacgaggactgcgatgttcagcacaggataaccccctcgtcgccctcaactacttcaccgatgacaaacgccttttcgcccgcatcattcagcgccttaatggccgcgtccgccgtctccttggagaccgccatgcacatgccgacacccatgttgaacgtgttgaacatgtcgcgctccggaatgttgcccgtcttcgcgatgaggtcgaagatcggcagcaccggcactgcggaacggtccaccttagcggtgaggcccttcttcatcatacgcggaatgttctcgtagaagccgcctcccgtaatgtgagagattgccttcacgtctgccgcttcaatggccgccagcgcaggctttacatacaggcgcgtcggggtcagaagtgcctcgcccaacgtgcagccgagttcttcgtaatacgtttcgagcttttctttattcagaccgaacacctttctcaccagcgagaagccgttcgaatgtacgccggaggatgccacgccaaccagcacgtcgcccgcctgcatcttggagccgtcaatgatcttatccttatctacaatgcccaccgtgaagcccgcgaggtcatagtcgtcctccggcatcacacccgggtgctctgcggtctcgccgccgatgagcgcgcagccggactgcacacagccctccgcaacaccctttacgatctctgcaatcttctccggcacgttcttgccgcaggcgatgtaatcgaggaaaaagagcggttttgcgccgcagcatacgacatcgttcacgcacatggcaacgcagtcaatgccgatggtgtcatgcttatcgagcagcatggccgccacgagcttcgtgcccacgccgtctgtgccggaaacgagcacaggttctttcataccggtcatgtccggctggaaaagaccgccgaaaccgccgatgccggaaaccacgcccggaatatttgtacgctttacgtgctctttcatcagctctacggacttgtagcctgcggtaacgtcaacgcccgctgccttgtagctatcgctgtaacttttcattctttaacttctctctttctttaaattatctataaaatgaattacatgaatttctctgtccagttgccgtttctgaacaccgggataacttcgccgtccggcgtgatgccgtcaatgttcatcgtcgcgtcgcccaccatgaagtccacgtggatgacggaatcgttcacgcccttgtcgtgaatctcatcaagcgtatacttgtcgtaatccttgatgacattcgggaagcccaagccaagcgcaatgtggcaagaagcgttctcgtcaaacagcgtgttgtagaacagaatgccgaggttcgagatgggagagtcgttcgggataagcgccagctcgccgatctgcgccgcgccctcgtccatcgcaatcatgtgctccaaaagctcctggttcttttccgccttgcaggagaccgcgcggccgcccttaaacgtaatggagaagttttcaatcaaattgccttggtaagacagcggcatcgtagaaacgaccgtaccctctgccttgcccttcatcggggaggtgaaaatctcttcggtcggcatattcgggttgaagaatgtaccgtccagcagcgtttcgccgccgcccatccactgtgcgtccgggatcaggccgcaggtgaaatcggtgccgttctcgctaaaatagtgcaggctctcaaagtgacatgcgttcagcttctcatagcgtgctttgagggaagcgttgtgtgctttccacgcttcaaccgggtcgttatccttagaaacacgcaccgtctgaaggattgcgtcccacagcttcttcaccgccacgctcgtgcggtcgttcgggaacaccttcttcgcccactttgcactcggcacggcgacaatcgtccactggtacttgttttccatcgcgtcgcggtacggctttctcaccttcatacgggcaaggttcgccttctgcattttctcaacgttcacgcccttcaggccgtccgggtcgtcagagtcgatccaaatgcgcaccggcagctcgtcaagctcatactgcatacgcgccttttcccactcctgcgtagcggaaagcacctttacgctttctttcttatagcgcatcttgtcaaggtcctggttcgtccagcggatgtccacccacttcgcaccggcgcggtaggcttcctccgccaccatcagtgcgatctcagactgcgccgtatccgccaagattacagcgccctgaccctttttgatgttcacgcccatctgaacgatgagctttgcgtactttctcaaaatcgattttgtcatcgtttatccctcccgaattatagctcggcaactttctgctgcaaggcttcgttctttttcgcaacaccctgctccatatccaccttcatctggtgcagctgctttgcgatgctctcgtcggaaagcgccagcatctgcgccgccaaaatcgcagcattgtccgcgccgtcaatcgccaccgtcgccaccggaatgccggagggcatctgcacggttgcaagcagtgcgtcaagaccgtcgagcgtggaagacttcaccggaatgccgatgaccggcagcgtcgtgtgcgcagccagcacgcccgcaagatgcgcagccttgcccgccgccgcaatgataacgccaaaaccgtccttttccgcgttcttagagaattccgccgcggcctccggcgtgcggtgtgcgctcatcacgcgcgcctccaccgggatgccgaactgcttcaatctgcgaatcgccggggaaaccaccggaaaatcactgtcactacccatgattactgcaacttttttgctcattgaaaatcaccgatcctttcaagttttgcggcgtaaaagaaagcaccgcgaaaaaaagaaaataggctgtgctcaaaaacacaacctatgcttctaaaattgaccgcaaaacgcccatgcagatacagtaaaaatgcacatcagttcagccatatcgcacctccggcacttgcagccttgaattttctgtccttagtctgtctcaagcgactgataaattaatccattaagcagacctttaaggcagcaatgtataacgttggtgcacaagctgcgccgtcagatttttcgtcaggctgcacggaacacccgcaggcaggctgacgcccggcaagggagttacggtcggcatggcggaaaaatgcaagccaattgcgcgccaaaccgtaggcgtactttatacgttgttgcctttattattttacgggatttaacgcgttttttcaatagtttttgccgtttttagaaaaaaatccaaaattctcccctgctcgtggacatgcgttgtatacctcgatatgtcccctttctccgcttccgtctcaccatatatcaaatacatagcaacacaccttgaaatgcaaaaagcgttttctgcgcgcctccgcactttattttcctcatgtccgacaaaaaaggacggctgaaaagccgcccttcaaaggactcctaattgggacccttgcagctaagctgttcaccggacagtttaacctattgctcgccgccaactctattttactccttcggcgtttccgtcgcaaaaatctccttcgcgcttgcggctaaacctgccataccctgaatctcagacggaatgataatcttcgtcgccttgccgtccgctactttctcaagcgcttcaaagctcttcaaggtcagcacagctttattcggatcggcttcgttgagaagcttaatggaatccgccaacgcacgttgcacggagaggattgcctccgcttcaccctgtgcttctctgattttcgtctcgcgcacagcctccgcacgcaggacggcagattccttctggccttccgcaatgaggatggcgctgcgtttttcgccctctgcgtccaaaatcttcgcacggcgctcgcgctccgccttcatctgcttctccatcgaatcctgaatttccttcggcggaatgatgtttttcagctccacgcggttaaccttaatgccccacgcatcggtcgcttcatccagaatgacgcgaattttcgagttgataacatcgcgcgaggtcaacgtgtggtcaagctccatatcaccgatgatgtttctcagcgtcgttgcggaaaggttctcaatcgcggagatcgggcgctccacgccgtaagcatacagcttcgagtccgtgatctggaaatacaccaccgtgtcgatctgcatcgtgacgttatccttcgtgataacgggctgcggcgggaaatcgatgacctgctctttcagcgagactttcttcgcaatgcggtcgataaacggaattttcaaatgcaagcccgtgctccacgtggcgtggtacgcgccgagtctttcaatgacgaatgcgtgtgcctgcggcaccaccttaatgttcgccgcaagcagtgcgatgacaagagcgatgagaacgataatgcccacaacgccccagttgatgtacagttcaaaatccatgtttttacctccagtttcaatttaagatacaaccggtgtcacgataagctttacgccctcaatgcgcaccacctgcacctttgtgcctttttgaatacggacattttctgtgctgcgtgctgcccagtcgttgccgagcacttccacgcgtccatgcgccgcaaggttatcgatatcctccgtcacaacggcggtctgccccaccacgcggtcggcgttcgtgtgcgtttccttgttttgcaggaactttttcacgagcggacgcgttgccaaaagcagaacgagcgtcaccacagcggcaatcagcacttgcagccaaaccggcgcgccgcacagctgcgcgatcatgccggcgatgccgccgcccacaaaccagatggaaataagctgcgcgctcatgccctccagtattgcagcaatcacaatgaccgccacccagatcatggtttccaaaatcattccccctttctcaaagcggaagccgcatacacgcgcccgacccgttcaggcgcccgcgcttcctatcctcatcatatcggattttcataaaatatgcaagaggttttcttccccggaaaaatattttacacagattataaaataccgcgcccgattctgccgagcgcggcttcaatatccttatcgattcacatgctccatgctgagcttcacgcgcagcccgtcgcctgtgttctgtacggaaacttcaatataatcgccgtcgtcgctcatgcggtcgtttttacccacaaggctgaaccggaactgcacgccgctgccgctttcgccgcccgccacgtctttcaaatacgtttcaagctgcgccgcgtcatacgtttctttcgtcttttccgcctgcgtgtagcgcgtcacggcatacgggtcgttaaactgcgccgtgaatttctccacaaacgctttaatttctgccgtgcccgcatcgctgttttcaaacatcttctgcgcttccgcatagccgaacacacccgcaccgccgtagtttgtggcaaaattcgtttccatcgtttgcccgccccacgcgtagtccagcgtgtagccgtagtcgcaggccttttggtcgtccttcagtcccagcgccttcacggcttcatccgcagactttccgaagcatccgagcagcgcttcattcaccgccgcgtccgatgtctttcctccgccggaagacccgccgtttccgcccgcgcagcccgtaaaaagcagcgccgcaagcagcagacacaacaccaagctgacatactttttcatacgatcacctttccttttttcggcttaaaaagccgccgtaccaaggcttttttgaacgtaccgaaatcgtacccgcctcggtattgttaaatatttatctactataatagtatcaagaccgcaccgcattgtcaatcggcggaatcccatatttcatcgcacaaacttgtgttttcctacaaaaatcccccgcacagggaatttcctgtgcgggggatcaacgttttatgacgttttcatgcggtttaagcgctcttcattagtacatgccgcccatgtccggtgctgccggagctgcgggtgcagccggctccttgatgtctgccacgagggactcggtggtcagaacggtggaagccacggaggaagcgttctgcagagcggaacgggtgaccttcgtcgggtcaacgatgccttcgtcgatcatgtcgccgtaggtatcggttagagcattgtagccgtagccgacggtgttctttgccttcaggtgctcaatgatgatggagccctccagacctgcgttcgcagcaatctggcgaaccggctcctcaagagccttcagaacgatggcagcgccggtcttctcgtcgccgtcaacggaatcgacataggccttaacagccggaatcgcatcgatgagtgcggtgccgccgcctgcgacgatgccctcttcaacagcagccttcgttgcagccagagcgtcctcaatgcgcatcttctgctctttcatttcgacctcggtagccgcaccgaccttgataaccgctacgccgcctgcgagctttgcaagacgctcctgcagcttctcacggtcgaaatcggacgtggtggtctcgatctggcttctgatctggctgacacggctcttgatagcctcgctgtcgcctgcaccgtcaacaatgatggtgttttccttgtcgatcttgacctgacgtgcacggccgagctgatcaacggtggtatccttcagctcaaggccaagctcgctggagatgacctgaccgccggtgagcgttgcaatatcggtgagcatttcttttcttctgtcgccgaagcccggagccttaacgcccacgcaggtgaacgtgccgcggagcttgttgaggatcagggtggtcagcgcctcgccctcaatgtcctccgcgatgatgacgagcttcttgccggactgtacgatctgctcgagcagcggcagaatctcctgaatgttggagatcttcttatcggtgatgaggatgtacgcgtcgtcgatgacagcgaccatcttgtcggtatcggtgaccatgtacggcgtaatgtagccgcggtcgaacatcatgccttctacgacctcgctgtacgtctcagccgtcttggattcttcaacggtgataacgccgtcggacgtgaccttttccatcgcgtcggcgatgaggttgccgatctgctcacttgcagaggaaacagccgcaacacgtgcaatgtccttcgtgccggaaaccttcttggcgttcttctcaatcgcctcaacagctgtctcggtcgccttctgaatgccctttctcagaaccatcgggtttgcgcctgcggtaacgttcttcatgccctcacggatgagtgcctgtgcaagcagtgttgcggtcgtggtgccgtcgcctgcaacgtcgttcgtcttggttgcaacttccttcacgagctgtgcgcccatgttctcaaacggatcttcaagctcaacttccttagcgattgtcacgccgtcgttcgtgatgagcggtgcgccgaacttcttatcgagcacaacgtttctgcccttcgggccaagggtgatcttaacggtatctgcaagcttgttgataccgccgagcaatgcttttctggcttcttcgccgtaaatgatctgctttgccataataaattacctcacaattccaaatatcaaaaataaagactgaaactcaaattactcaacgactgccagaacgtcggactgacgaacgatggtatattcctcgccgtcgatcttcacttccgtgccggtgtacttgccggtgatgacgcggtcgccggccttaagctgcataacaacttccttgccgtctaccatgccgccggggcctactgcgataacacgggagatttgcggcttctcctgtgccgcgcttgtcagcacgatgccgctctttgtggtctcctccgctttctcggcctgaatgagtactctgtctgtcaaaggcttaatggtcataacttccacctcggcgcctaatgcgccgtatcctttctccccgcagttcataaataaatttttcgcgtacagcggggtgcgccgcgaaacccgccggggtgcggcccggtcggtaaagaaatacaagtttaggtctcggggagctgtgccgcttacgctttagcactcattatccccgagtgctaaacctattctaatcacttggtcaagaaaagtcaatagggaaaacgcgatttttttgacttttaacagttccgtaataattttgtcctccgatgtcctctgatgtccgcttttttcatacaaaaccacccacaaaacgacaaaaaacagccccgcgctcgtttgaaagccgggactgtcttttgcaaatgacagcttaaatcatggaggcatattcgtcaaacggcgctaagctccgctttaaaatgccattgatatatgcaatgagaatgccgtagttcgtgtacggcacacctttttcttcggcggaagactgtctgaactgcatttcgcgttcattcagcatacagccgccgcagtgcacaataagggcatacggcgaaagatcttcgggaaatccgccgccggaagtaaactcgaattcaaagtccttgccggtgtgtttgcggatccacgcgggcagcttcacggtgccgatatcgccgcactggcggtggtgcgtgcagccttcggagatcaaaatgcggtcgcccgctttcagattctcaatagccgcagcgccgcgcacggccgtctctaaaacgcccttgtagcgcgcaaataagatggagaatgacgtgagcttaatgctctcgggcacgatctgctttactttgccgaatgcctggctgtccgtaacaacgagcttcggcggcgttttgaggccgtttagcacgcccgcaagctcttccacctgcgtgacagagcatgttgcacccgcgtccagaatgtcgcggatggcctgcacctgcggcaaaatcatgcggcctttcggcgcggaggaatcgatgggcgtgacgagcaccacgtggtcgccgcgctcaagtaagtcacccaaaataactttggtgttctgcccctttgcagcgatggcggcaagcttttccttgagctcaaaaatatgctcgcccgtcttcgcgctgaccgcgatttcgttgtcgttttcggccttgaacccgccgaggtcgtctttattcaatacgatgatatacggcacgccttttttctcgatgagcttttgcagtgcgaggtcttccgcacttttgccgaccgtgccgtcgatgacgagcactgcaatatcagctttattgagtacctgccgggcgcgctgcacacgcagctcgcccacggtgccctcgtcgtccatgccgggcgtgtcgataatgacgaccggtccaagcggcaaaagttccatggctttctgcacagggtcggtcgtggtgcccttgacatcggacacaatggagatattctgccccgtaacggcgttcaccacgctggatttaccggcgttgcgcttgccgaaaaatgcgatgtgcacacggtttgccgagggggtctggttgaggtctgccatagaaatcgcctgccttttaaagaataaccgaaagttttagaaacggaagtcgcgctcgccgtgggcgaccttttcaacgtagccctttgcgatgctgcgggtcttctcgttcgggatattttcaagctcctgcgcgatcatcttttcgccgatggccttcgtctccggggaagcgtagtcctcgaggaattcttttaaggtgatgagtgcgttcgggtggcagcagttctggatctgtccgctcttacacaggctcatgaagcggtcgccggtgcggccctcgcggtagcatgccgtgcagaaggacggaatgtggtcggtctccatcagccagcggacgacctcgtcaagggagcgctgatcggaaacgtcgaactgctcggtgtcggtggggcgctcctcttcggcatagccgccgacggaggtacgggatgcgccgctgatctgcgaaacgccgagattgataacctgcgcgcgcaccttctgactctcacgcgtggagatgatcatgccggtgtacggcacggcgatacgaataagtgcgcagattttcgcgaatgtttcgtcgctgatgccgttatcgaacttcgtcgggtcaatgtcgtcggcttttttaaggcgcggcacactgatggtatgcgggcctacgccgtgcacggcttcaaggtgttccgcgtgcatcagctggccacagaactcgtaacggtacatttcaaggccgtacagaacgccgagacccacgtcatcgataccgccctccatggcgcggtccatcgcctcggtgtggtaggcgtagttatgcttcgggcccgtgggatgcagcttttcgtagctttccttgtggtaggtctcctggaacaggatgtacgtgccgatgccggcttcctttaatttgcggtagttttccacggtcgtcgcggcgatgttgacgttcacgcggcggatagcgccgttcttatgctgaatgctgtaaatggtcttgatgcagtcgagaatgtactcgatggggttattcaccgggtcttcgccggcttcaatggcaaggcgcttatgacccatgtcctgcagcgcaatgacttcctttgcgacctcctcctgcgtcagcttgcggcgtgggatgtgatggttctggcggtgatacggacagtagatgcagccgttcacgcagtagttggaaaggtacagcggcgcaaacatgacaatgcggttgccataaaacttgtgcttgatctcgtttgcgagcttatagatttcgtccagaatctccgggttttcgcaggcgagcagaacggatgcttcgcggtgtgaaagccccttacacagacgggctttatcgagaatttcgcggatgagcggcatgttgtctttgttctcgtccgcgtattttaaagtgtcttcaatttcttcgtggcagataaattcctctgcttttaaggatttcggatcgtacatagtttgataatttcctttctttcgggtcagttcactttcccgttagtcattttttcggatcactccgttttgatttccggctctgtgctcgtgaaattggaatacgccgttttgatgttggcgccgcgcacgcgcccgagctttcccgccatggcgctgatgacatcctgtggggcatccaccgccacacagatgatgttgatatttttctgtctgtacggcagccccatgcgtccgatgatgtaccgaccgtacaggtgcagaatgtcgttgatttcttccgcgtgggcgttatcttctaaaataatgctcatcacggctacgcgtgtctgcataaaacacctcccgtttttataaaacaagcaaaacaaaaatgctccctgccgaaaatgcaggaagcacaaaaagcgcagaatctatctgcggaatatacctctatccattttcggcttacacgcggcgatgccttgtgctcagaacgaaaaagctgttttgcggcgcaccgcagaaaaaactttggtgaaccgtgttttgtatagtataacggattttcagaagtttgtaaagagcggattgcaaattttgacaacgaaaaagccccggcgtacagccgaggctctgtttgtttcaaaaattacgcgtccagcatggtaatgacgtgcctcgggcagacctcggcacatttgccgcagccgatgcactttgcgggatcgaccttcgcgcagaagttcgttacctttacggcgcccacttcgcacgccttcatgcacttgccgcagccgatacagcctaccttgcaaaccttcatcgtctctgcgcccttatcacagttggagcagcgcacgaccgcctgctttttcagcggcacaaagctgatgagccccttcggacatgcagcggtgcattttgcgcagccgcggcactttgcggggtcgattgacgccatgccgttgcagacgttgattgcgccgtattcgcacacggcggcgcagtcgcccatgcccatgcagccgtagcggcagctggagataccgccggcaagcagggtagatgcggcgcagctatcgatgccgtcgtagcgcattttgtcgctggtgcagtcatagttgcccatgcagtggacaagcgccgtctttttctcgacggcaacgtcgcccgtgccaagcagctctgcgcacgctttggcgcacgcttcgccgccgggagaacacagcccgggctgcgcttcgcccttagagagcgccgccgcatagccggagcagccggaaaaaccgcacgcgccgcagttcgcgcccggaagcacctctaaaatcgcttccgctttctcgtccttcggcacggccatgatggcggaggcgaccgccagaataatacccgccagaagaccgatgcccgcgacgatcagaaccgggatcaaaattttatccatatagaaacccctttcgttttgctcaggcgagcagacggtctataatgccgttaaagccgaggaacgaaaccgccacaagcgacgcggcgatcagcgtgatcggcaaacctttgaggaaattcggcacgtcgcacagctcgaggcgctcacgcacaccggcgaaaatgaccattgcaaccatgaaaccgatgcccgcgccgaacgcgttgacaagcgatgccaaatagccgaagctcgggttttccgcgcctttttcgagcacgagcatcgtcacgcccagcacggcgcagttcgtcgtgatgagcggcagataaatgccgagcgcgttatacagcggcggcatatacttgtgcatcacagtctccaaaagctgcacgagcgccgcgatgatgaggatgaacaccacggtctgcaaataatcgaggttcagcgggacaagtacatacgtatacaccggccatgtgaccgccgtcgcgataaccatgacaaccgttacggcgcagctcatgccgaacgccgtattgagctttttggaaacgccgaggaacggacagatgccgagaaacttattgagaatatagttctccgtgaggattgcggcaaggaaaatgccgactaaaaatttaagactcatgctttgccgccctccttttcacatttttcctgtaccttagagcaggaagccgccaacgggcatgcagcgcagcccatggtctccggtgctttgccctccgtggaaagcttgcccgcaatggcgatgagaataccgaacacgaagaagccgcccggcgggagcaggaaaatgatgatgggatccatgaaattcgagaggagcggaatgccgaacacggtacccgcgccgagcaattcacggatgatgcccatggcgagcaacgcggcggtgaagcccacgcccattccaagaccgtctacgatactcggcagcacgggatttttgctggcgaacatttccgcacggcccaaaatgatgcagttgacaacgatgagcggcaggaacacgccgagcgacttgttaagcgccggcacgtaggccttgatgagcagctgcacaatggtaacaaaacccgcaacaatggtgatatacgccgggatgcggactttatccgggatgatttttttgagaagagaaatcacggcgttggaacatacgagtacgaatgtcgtcgcaaggcccatgccgatggcgttcgaggccgccgtggtgacggcgagcgtcgcgcaggtgccgagcatcaggcgcagcacggggttctctttgataatgccttttgtaaattcttctttgaggctttttgccatgttatgcgccctcctttaccgtgttgtactttgtgatggcttcgttgacggcgttcgtcactgcgcggctcgtgatggacgcgccggtcatggcttcgatctcgccgtccgacggcgccttattcttcacaagcgtgatgcccttttccggcgcagtctgcttaaactgatccgtaaaggaagccttttccgcattcgcgccaagacccggtgtttcgctgtgctccagaatgacaacgccggtgatctgcccgtcggcgctgatgccggtcataaccttcaccgcaccgccgtagcccttcgcctccgtctggaaaacgtagccgaccgtttcgttattcgctttgccgatgtaatagccgtccgcttcttcaaagctgtccgcgtcgctcaaaacgacttttctcgactgctccgcttccagcgcggactgctcggcgatcttatctttcgtaagcaggtttgtgcccgccagaagcgccgtgacgacaaggcaaatgacaaacagaatgagcgccggttttaaaatatctttcgcggtgatcttcattttgcgtcacccgctttctttgccttcattttgccgaacgtctgcggcttcgcaacgcgctcgatgagcggcactaaaatattcatcagtacgatggagtacgatacgccctccggcagagacgcgaactggcggattaaaatcgtcagcacgccgcagccgacggcatagatgacgcgtgcgctgaagttgatggggcttgtggtgtaatcggtcgccatgaaaatcgcgccgagcaagaggccgccggaaagaatatccatcagcggatcgcggccgagcagtgcggaaagcaccgctgccgttgcaaggtacgtgaccgggataaccgggctgataacgcggcgtgcaacaaggtaaatgccgccgagaatgagtgcgagtgcacaggtctcgccgaggcagccgcccgtgttgccgagaaacatatcgaggtaactcggcagcgccgcacccgtgccctcggagagaacgccgagcggcgttgcggtcgtcatggcatcggagaagctgtggtccatcggcgccgtccacgcggtcatttttgccgggaacgagttcatcagaatgatacgcgccgtcagcgcggggttcacgaagttctggccgatgccgccgaacatctgctttacgacaacaatggcgatgacgccgccgaacgccgcaatgatggggctgatggaaacgggcaggttcatcgcgagtaaaacgcccgtcacaacgcaggaaaggtcaccgaccgtctggcggcgcttcatgacgcggcgggatatgtattcgctcaaaatgcaggacgcgaccgtcgtcaggataataaccgccgcgcggaagccgaaaatgatgacggacgcaatcatcgccggggtcagcgccaaaatgacgtccagcatcaaagtctgggtggtgtcttttgactgaaagtgcggcgaggaggaaacgatgaatttgttcactttttagccgcctccttctttacatagtatttgccgaggcgaatggcctgcacgatgcggcgtttcgccgggcaggagaatgcgcagcagccgcattccatgcacgtcatgatgtcgagttttttcagcatttctacatccttgcgctccgcatatttttcaagctttgcgggcacaaggttcatgggacatgccgcaacgcagcggccgcagcggatgcaatcggtcggctccaaaaggcgcgcttcttccgcgccgaatgcgagtaacccgttattctgctttaagaccggcagctcgtcggttgtcacagcgacgcccatcatcgggccgcccatgatgagcttctgcggttcttccttataaccgccgcagaattccatgacctcgcgaatttttgtgccgatgggcacaatgacattctgcgggttctgcacggcgctgccgtccaccgtgacgcgcttcatcgtcagcggcatgccggtgcgcatgtagcttgcaaggaacgagacggagccgatgttcatgacaaggcaacccacgtctgccggcagaccgcccgccgggacttttctgcccgttgccgcctgcaccagcaccttttccgcgccctgcgggtagcttgcatgcagctttaacacgcgcacttcgtcgttcgggtccattttcgggtcatccgcaatgcgcgtcagcgcttcgatggcgtcgggcttattgtcttcaatcgcgatgatgacgcggtgcacgtctaaaatctctttaatcttataaataccggcaagcacgtttttgccgttttcgagcgcctcgcggtggtcggaggtaatatagggctcacactccgcaacgttgacgatgagcgtatcgatttttttgtccggggggacgtttaatttcacgtgcgccggaaagcctgcgccgccgagaccgacgagacccgaagcgcgcgccgcatcggtcagctgctgcttcgttttgatctccggtgggggacataccgcagggtcgtgctccattaacccgtccgacgtgatgatgacggcgtccaccgcctgcccgccgggcataatgacttttttgatctctttcacggtgccggaaaccgaggaatggatcggcacggaaacgtatgcggcgctgtccgcaaccttggtgccgacatacacgcggtcgccctttttcacacagggcacacacggtgcgccgatgtgctgcgtcatgggcagcgtgatctcatcgggcggcggcatcacgcgcgtttcggtgtgcgccgtgttcttatggtgcggcacatgcgcgccgccgtgcgtgcggaacgggcgcttcggaaaagactgttccatctttattccttcctttctttcgtgttaaaaaacagactttgccggtgcaagacacaacaaagtcacagtttttggatttattcaattttagcaccgcttttgtacattggcaatagaaaaaagcggtatttccacaattttctgacggaatatgggcatgcacatttatttgtaagctttaccgcatgcgtcgcacggacgaaatgagccccgtatcgtactccgaacgcaggatggagtaacacacattgtcgaaaacttctccgtcaaaccgcttgaagccgcacggcataacgccctcaaagatgaatcccgcgcgctcgatgacctttcttgacggctcgttgcccacaaagtggctgatggcgacgacctcgacgttcatcacttcaaacgcgttctgcaccatggcgcgcagcgcttccgtcatgtagccgttatggcggtagcggcgcgaaagctcgtagccaatcgaaatactgtccgtattatagcggcagtaatcgcgctggtacttgatcttgcccatcacttcgcccgtttcgcgcagggtgatggcaaaggcatacgggtcgtctgcggcgcgcctcaattcactctccgcctccgccggtgtagaaaccggtttggagcccgcccgcagcatggtatccgcatcggcggcaaacagcagaaagccgctcatgtcctgcatggaaaagcgtctaaggcgcaggcgcggcgttaagatttccgcttttccgagtgtatcaccgcgcattgttcggctccttcggcaatgccgcgccgcgcggcaaaatgaaattcagtgcgtgcggcagaatgttgtattcctcgcttttcaccttgatgcacaagccgtccatattgctgacgacttcattttcgctttgaatttcgatcttcacgccgcggcggtaaacgagcaggtcggaaaacgccgggttgcttaaatgctcgccgcgtttatacttcggcacaagacccggaatgcgggaataggcgggctttcggatcagcacaaaatcgagcagaccgtcgtctatcaccgagttcggcgcgccgcagtacccgccgccataccagcgaccgttgcccgcaagcgtgaacagaaattcgcccgtaacggtctcttttgtgccgtccgcatagtaaaacgttacggtcattttgtccgcaaggtgccccaaaaagcactttgcaagcgaaatggtatacgcaagctcgcccgaaacgaacggcaggtgcttataataattcatctccgccgccaccttggcgtcaaaacccacagagcagatgttcacggcatcgccgtgctgcgtgcggatcatatcgatggacacagtcttgcccgccagctgattttccggattcaaaaacacttcgcgcttgccgaatgagcgcacgaagtcgttgccgctgccgcacggatatacgcccacggcggcgtttttgtgaaactccgcaccgcgcacgacctccagcaccgtgccgtcgccaccgacggcccaaatgcgcaccgcatcgcccttttcggcggccgctcttgccagctcctcgccatggcccgcgcgctgtgtgaggtaaatttccggctcttccccgtgcgtggcatgcacggcgcggatgcgctccataaactgcacggtatggtcgtgcttgccggcttttgggttgatgatataaacattccgcatatgtaccctcccctaaagcatcttttatgccttaaaatacatgtaatactggcagcggatcatgccgttgtagagcttgcggcggcggtcggcttttttgccgaagcatgtctcaaaccgctcgtccggactgatggcagcatagctccagccgcgcttcggcgtgaagacgtgccccatcgttttgtagatgtcctccgccgttttcacgtctaaaagccgctcgccgtacggcgggttgcagatgacgcagccgaacgggccgtcgttgctgaaatccttgatgtcgcgcacttctgcggagatatactgcgcaactcccgctttcttcgcgttttcaagcgtcaggcgcacggcttcggggtcaatgtcatagccgaacgccaaaaagccctcatcgcggcgttcaagtgcctttgcggcaatgtgctcgttgtcccagatatttccggggacagctttccacttttccgccgcaaagtggcggcgcaggccgggcgcaatgtgcatggcgagcatggcgccctcgattaaaatcgtacccgaaccgcagaaagggtcgatgagcgtgccgtccgtgcgcacacgggaaagctttgccatgaccgccgcaagcgtctctttgatgggcgcttcattggaatttttgcggtaaccgcgtttgtgcagccccgcgccgctcgtatccagcataatgctgaccttgtctttcataattaaaaactgaatctggtagttcgcgcccgtctccgggaaatgctccagcttatacgcctccttgaggctttccaccacggcttttttgataatggcctgacagtccggtacgctcatgagctgacttgataagcaccgccccttgaccggaaatgcgtcgtcgcggccgatccactccgtccacggcagggccttcacgccgcgaaacaggctttcaaagcttttcgcttcaaatgtaccgagcaaaacgagcacgcgctccgcaaagcgggagcagatattcgcgcgggcgatcatctccggggagcctgcgcacagcacacgtccgttttccggcgcgacattttccgcgcccatatcgcggagctcctccgctacaagaccctcaacacccaaaaggcagggcaaaacaagctgatatgtatgcaaagttatcaccattttcatttcatatatttaagtattttttagtataccataaatcgcgcactttcgacaccgtatacagaaaaataaataaaaaaattacccgccgacttttgaaaagccaacgggcaatgaatttaagcttaatagaacgtcgcaacgggctgcgcgggcgcttcggcaggctcgatgttctgaagcgtcagaaccggacccttgcggccgtagagcttgtgccacttatacgcaacggaaaggcgcatggtgtaccactttccgttttccggcattttgtccgcgtcgcacagcgtgagcagacccgcaaactggatatcctccacgcagcaggtcatcagctggcggccgaagaagaacatgcccggcttcatgcgcgggttcacggctgcaaggcccttatactcgacgaccttgccgtcgtactttttcggatcttcggaaaggtcacggtaccacagcgcgtaatcgccgtcttcaatctttacgaccggcgcgttgatgtcaaacggcagcggatcttcgatctcgtcgtattcaacgtcgccgttcgtgtactcgtaggcgatgtccgggcggcggctgatgccgcgcacaatcttgtggaacgccattttgtccatgtccttcgtgaaacggttgaacacgaccaactcgcagccggagagcttatccacaacaaggccgcgcatgttggcgttgtaagtgaggaacgtcgtcgcgtccgcgaacataaattcctgatagaccgcccagttttccggcatgttgtcgtacagcgttttcaactgccacatgccgttgtactcgatgagcacacgggaagcgcggtgctttttcgcgaggatgtcaagcgtttcgctcgtcagctcgtcttcgtcctcaatgttttccacatagatgttcttcatgtaggggcgggactcgtcgtactccgtctcgccttcctcgcagacgagcagcaaggtacgctgcccgttattgaaacgcttatccgcaagcgtttcgtctataaaagaggtcttgcctgattcgagaaagcccgtaaacaggtaaaccggcatatcatccatccatattccgcctttctgtaaggttcagcccgcattacgcgaacagcgcttcgatcgcggcctcgttgatgtgagaaccgatgacgcacaggcggccgatgacaccggcgctgccgttgcgcacagaggtctcctccggcacgtagtcgaagtggatccactcgccgtcccgacctgcaacgatgccctttgcacgcaggatcataccgtacttttcgctgttgtcgagctcctcgagaatgtgctcgatctcgtccttcgtgaacttgcgggtcgtctcggtgccccagcttgtgaacacctcgtcggcatgatgatggtggtgatgatgctcgtggtcgtgctcatcgtggtcgtgatggtgatgctcgtgctcgtcctcatcgtcatcgtcatgatggtcgtgacaaccgcaggtgcagtgctcgtcatgctcttcatggtcgtgatggtggtgatggtggtgctcgtgctcggtctcctcggcaaggagcttcagctcctcttcaagggtattcttgtgctccatcgtctcgagaatctgtgcgccggtgagctgatcccacggggtggtaatgatggtggcgttctggttgtgctcgcgcaacagagcaacgcaggcttcaagcttttcgggcttgataccgtccgtgcggctcagaatgatggagtttgcgtgctcgatctggtcgttatagaactcgccgaagtttttcatgtacattttgcacttgtttgcatcggcaacggtggtgaagctattcagcgtaacgtcttccatgtgcaggttctgcacggcacggatcacatcgctcagcttgcctacgccggacggctcgatcaaaatgcggtccgggtggtaggtctccagcacctgacgcagtgccttgccgaagtcgcccacaaggctgcagcagatgcagccctggctcatttcggtgatttcaatgccggcgtcctgcaaaaagccgccgtcaatggcaatcttgccgaactcgttttcgatgaggacgagcttttcgcccttaaaagcttcggagatcagcttgcggatcagcgtggttttgcctgcgccgaggaagccggaaaaaatatcgattttcgtcatattctcatgccctttcgcaataatttacggtttggataaacgctcttggaggggccgcgcaattcgctttctgcggaaagcgaccaaaggcgctgtccttgggatccgccgcctttgaaaaggcgggcgaaactttattcgctcggttgtctttcgcttatcacagaatggaagtttactgaaactttcggtctctccaatcttgtattgtaaatctttcttttaaaagttgcaagagaaatcgataaatgtttacactttcatcattttcatgcgctttcgcgccgtttctatccttcgcttaggtcaaaatcctcgcttaaaagcgccgcaagctccgcttccgtcagccttgtcacgtctccgcccgtcaatctgcgagactggtttaagattgcgtcctcgaccaaattgcgcaccaagcgtccgttgcccgccgttctggcgtccgttgcctgccgcttttcgtaatattgaagcagcggcgtttcgcatgtttcatcgatcgtatagccctttttctttgcggtcagctttgtaatggccagcagctcctccgccgtataattcggaaactcgatgatattcgggaatctcgagcgcaggccggagttcgccgtgagaaactcctccatttcttttgtatagcccgccaaaataacgataaggtcttctctgtggtcctccatccccttgacgatggtatcgatggcttccagtccgaaactgtcgtctgcgccgcggtacagcgaatatgcctcatcgatgaacagcacgccgccgagcgcagagcgaatgacctgctgcgtgagcggtgcggtgtgaccgacgtatttgcctacaaggtcggcgcgcgtgacttcaatcagctgcccgccgctcagtacgcccatggcttttaaatagcgtgaaacgagccttgcaatggtcgttttgcccgtgccgggattgccggtaaagatcatgtgcatggtgggcacatcggccttcatgccgcgcgcttcgcgcagccgctgaatgatatagttctgctcaagcgacagcacgtagtccttcacttcactaagtccgatgatctcgttaagctccgatttcacttcctcggcggctttcgggtctgccgcatgctttttctcttcttccaccgtgacggcaaaatccgggaatgtgaacgcgagcacaccgtcttttacgccgagtgtgccggaaacggtcttttcaccgtccttttccgcgcggcgcagcttttcttcgctcaaaaggcggaagcaacgttccgtcagccgcgccatgctctccacgccgtcgcggcgactgaatttatccgccaaaaacgccgaggcatcctcaccgaacgtgaacgcgtagtttagcttagcctttgtgcggtcgtttaatgcaccgagcgccgcttcgccgatcctgagcaggctctcgcgcgtgaattccgccgtgcggcagaaatccgtgacggaggacaaaaatgccgcgccgaacgcatcggtgaacgcgctgtccttttggctcgtcaaaaagacgaggtacttcccgtttacggaaatttcgctgacggcatcgggcacaagcgccgtgccgacatcgatgagcatgcctttctgcaaagcataacgcgaagctaattttaaaacgcccgtctcgcacagcgccgccaccatgggcagcaaagatttgtggcactgctcaaaattttcaaacagcacaatatcgttttcgctgtgcagcgcggaaaaaagatcctgtgtgagtaatttaccgtcttcggcgttcgggtagcgggaaaggtcgatgttcgtgacctcgccgtttttcaaaacgccctctttgcagagcgccgcagccgaagccgcaagcgcactgtgcctgcctgtgccctctttgccggagatcacgacgaccgctgcgggcttgccgttttcgcgccccgtcacgctcgggcggcgaaatgcggtgaacaggctgtccaaaaatgcgtcctgcccaatgaccgttctgcccgtcgcttccctcgcctcgcggaacgactgcgcggggtcctgcggcggctcctccgcgccctttgccttcggctttttttctgcggtctccgctttcggcgcttccatttcgggcgtgccggtcaggccctcggcgtccagcagacggcgcatttcgtccatgctgcgctgcgcgtcgctcgtcagcttatcgaggtcgctgatctgccgattcaggctgctctgcatgttggcattcgttttttcgatgctgttcaaaaaatcctcggcgtcttttgcggcgcggcttttcgtgccgctgcccacattcagcttgccgccggaaaacagtgcgtccaaaatgctgtcaatatcgtttttcacctaaaatcccctttctccgggtaaagctcaccgcgcttcgattgctgcaacgacgttttgcaccaaagcgctgtccgtcactttatattcgttctccgggatacccacgccgttcaatttaccgccgaaaaagatctccgggttgccacagacgcttgtgtcgtgccgcagggagcgcgccgaggcgtgtacactgtgcgtgccggtctcgttgataaattccccgacattctgcgtgttgatgccgccgccgggcagaatatcgatgcggtcacttgcgtattcgatcatctttttcacagtctttgcgccctttatcgcgctttcacgctggccgctcgtcaaaacgcgcgttacaccgagggcaataagatcatcgagcgctttagatacgtccggcaccacgtcaatggcgcggtggaacacaatctcggcgttcgggttgattttcttgattttcccgataaaatcggcgcaacggtcggtgtcaaccgtgccgtccggcttcaaaaagccgaagacgatgccgtccgcgcccgcatttaacagtgcctccatatcgcggcagcaggtctcgtaatcgaaatccgtgtagcaaaagccgccctcgcgcgggcgcaccatgcacatcacgggaattttcagtgtatttttcacggcctgcaccgtgccgatgctcggcgtaaggccgcccaaaaacagcgcggaattgagttcaatgcggtctgcgccgcctttttcggcctgtacggcgtcttcaaaacagccacagcaaacctcaaaccatactttatctttcatatttataccaactttcgtttatttgtcctatctgcggcgctttaaaacacgccgctttctgcactttcgactattctcacacaaatgcctttacaatcctctaaaaaagattataatagctttgaacgtaaaaagaaagataaatcgttaaattctaaagacaggggacgagattatgtcagataccgttcgtttaacagaagaattccgtggcgggcttttggacctgacgcattacggctacatcagcattgtagatgaaaagggtaaggtcatctactccgcaggcgacccggaggccatggttttctaccgctccgcttcgaagcccgtgcaggcactgcccgttatcgcgcatcacctcgacgaaaaatacggttttaccgatgaagaaaccgtgctgttcgcaggctcgcatctcggcgaaagcttccacgtcaacgctttgaaatccatcatgaaaaaggccgacttaaatccggaagacctcatcatgaagccgaccgtgccgggctctacggaagcaaacgaagagcgcatccgtcagggtctgccgaagtcgaagctctaccacaattgcagcggcaagcacgcagcgctcatgctcacccagcgtgaaatgggcggcgacgtgaaggattactggaaggtcggctccgtcggacagaacgaagtgctgcgcaccatgagcgtgctctccgagtacccggaagaaaaggtcgtcatcggcatcgacggctgcggcgtgccggtgttcgcttacccgatgaagaacatcgcgacggcatataagaacctcgcgtgcatcgataccattcaggacgacgttctgcaggacgctgcccgccgctttgtcccgcgtatccatgaatatccgcacatgatgcgcggcacgggctacctgtgctccctcatcaaccacgacgcgaacatcatcgcaaagggcggcgcgaacggcgtgtacggcatcggccttaaaaaggagcgcatcggcatctccttcaagattaaggacggcaccgaggcggtctggccgctcatcatccgcgagatcttccgccagatcggctactataacgccgataccgataagatgctcgtctcgcttaacaacggcgtcaccgtcaacgacaacgacacgcccgtcggcgaagtgaagaccgtgtttacgcttgaaaagcacttctaaaatctaattttcattcagcattttagataaagtctctgcatcgatttgtcccggtgcggaggcttttccttttgatgcaaacgtcatcacagagccgaacgccccgccgcgcacgcgcgtcaccttgccgagctcgcccatggaaatgccgatgagcggcccgcagaacgcagtggattcattcatcgccgccagcatcaccatcacatcgcgctcattctgcggcatcacggcgattttcggcaggtcggcatttaacgccatcatacgcttatagcggtcggcgatttcctcgcgtgcaggcgttttggcaaaatcgtggttcgagataataagcttcgtacccatatcgtgcatagcctgaacggtcgcctttgcaacgtcatcgtactgctcgcaaagaaaaagctctaaatcgacaagcggcgcacccaaggcgctcagctgcgcgttcatcgcaaaatagtccataggatctatcgctttttcgccgccctccgcttttgtgcggaatgtgcacagcacgggcagcggcgcagccgctttaaaaatctccggcgcggccgcaaacatatcctcgtcaaaataatcgatgcgccattcgataagatccgccggggtggtcttgatctcttttacggcgtctaaaaccgcttccgttgtcttctcgcacaccggcacacaaattttcattctgccgctgccgaataccaaatcatttacaactacctgccgcatagctttcgctccctttttgtcaacttgtacacagtatagacaatttaagcacaaaagtcaaaacaaaaagtatttgtatcttgtaacagacttctaaatctgctatgatgattttgtaaccgaataaatcccttttcctacgtataaagtgaaaggagttggccttatgacccgtttacaaacccatttattcgcttttcttttgtgttttctgctgcttttcaccgcgtgccaaagctcaccggcatcctcaggcggcgtagatgaaccgcaaagtaccgcatcagagccgagcgcggccgagaccgcaacgctcactgcgcgcattgtcgatatttcgggcaatctacttttgctcgccggagaagacgacggcgtgtaccgctgcgcaaggccggaggacgcgccggacggcctcatccccggcatgatggtggacgtcacctacggcggatatatcaaagccatttacccgagcgagcccgataacgtgcagaaaatcaccgtacgcgaaaatgaaacagacgggcgatgcgcgctgtatttatccgtgctgcaggaattattcaacacggacgaagcgctgcaaagcgacaccgaatatgtctccgttgacctgaccgagacgccgttgacgaaaggcgagatacaggcgatcgcatggcggttcggcgagcttaccgagcgccgcccgctcacgttcacgtttaaggagctgcaagacgagggctacttagaaacggacgagcttttatgggaagacggctgcttatttaagatcacggagaaaaacgatgaaaacggcgtgctgacgtttgacgccgaaaaatggcgtgccggggacggtgcctcttactttttagactgcactgcaaagcaaaataaagacggcacctatgccgattttgagatcggcgcatttgctgccgcataaagttatcatcaaagagggaatcaacatgttgaaaagtcaggaagttcgcaagcttgcgccggaaatggacccgctgcgcatgggcatgggctggaaagaggaggatctcacaaagccgcagattttaattgaaagcacctacgggcagagccaccccggctccgcgcaccttttaaatttggcgcagaaagcaagctggggcgcatacgaagcgggcggcaagggcgcgctttactttgcgaccgatatttgcgacggcatggcacaggggcacgatggcatcaattattccctgccctcgcgcgacatcatcgccgaccttgtggaaattcacgccaacgcgacaacgtttgacggcggcgttttcctcgcaagctgcgataaatccgtgcctgcgctgctcatggctatcggccgcatcaacattccggccgtgttcgtgacgggcggtgtgatggacgcgggtcccgaccttttaacgctggagcagatcggcaaatacagcgccatgtttgagcgcggcgagatcaccgaggagcagttcacgtattacaagcaccacgcgtgcccctcctgcggtgcatgctcgttcatgggcaccgcgtccaccatgcagattatggcggaatcgctcggcctcatgctgcccggcacggcgctgatgcccgccacctgcgaagatctttccgttgcggcggaggaagccggcaaaaccgccgtggcgctcgcgaaaaagggcgtgaaagcgtccgatatcgtcacgctgaaatcgttcgaaaacgccatcatggtacacgcggccatctccggctccacaaacacgctgatgcacctgcccgccatcgcgcatgagttcggcattccgctcgacgcggatacgttcgaccgcatgcaccgcggcgcgcattatcttttgaatatccgtcccgcaggcgagtggcccgcgcagtacttctattatgcaggcggcgtaccgcgcatcatggaggaaatcaaagaccacctgcatctcgatgtaatgaccgtcacgggtaaaacgctcggcgaaaatctggaagatttaaagaaaaacggcttctacgagaagtgtgatacctatttaaagaaaaccggtctcaagcgcacggatatcatccgctcgttcgatgatcccatcggcacgaacggcgccattgccattctgcgcggcaacatcgccccggacggcgcggtcgtaaaacacagtgccgtgccgaaggagatgcacaaggcgcttctgaaggcgcgcccgttcaactgcgaggaagatgccatccacgccattttaacacaccaaattcagccgggcgacgccgtcatcatccgctatgaaggcccgagcggcagcggtatgccggaaatgttctacaccaccgaagccatttcgagcgacccggagctttctgccagcattgcgctgctgacggacggtcgcttctccggcgcaagcaagggtcccgccatcggccatatttcgccggaagccgcacagggcggccccatcgctttaatcgaagaaaacgaccttatcgagatcgacattccgcagcgtattctgcgcgtcatcggtatcaacggcgaaaaatgcagcgaggaagaagtgcagcgcgtgtttaacgagcgccgcaaagcgctgccaccgtttaagagccgctacacgcacggcgttttaaagcgcttcacgcaaacggcacactcccccatgcaaggcggttacatggactaaaccgaatcctaaaagcctgcgttatgcaactctcattttgagcccctgcacaaagcaggcttttctttttcaaaattcaccatgtatatacgtataaatatacattagtttgtgcattattccgcttgatttttgaatgaaatcggcgtaaaatacattcatcttcaaaattatacaaaccaaagcttaaaggtatattgcagaagggtgaatgtaaaatgaaaattcaaaaggtttgcgcttcatttttaattggcgctatgatgctctcacttgcggcctgttcgggcagtacgaagaagattgaaagcccggcggactttgagggcgcgaaaatttccgtgcagacggcaacctccgcgcacgaaagcattcaggatatgcaggacgagggcatgaacatcaacgtgctgccgtacgaaaaggtgacgcagtgctttgacgacctcgcactcggccgcgtggatgccgtgtacgtggacagcgtcgtcgcgggttactacctcgcggaggacgacacgaaataccagaaaacatggacgagcgaaaccggcgagccaatcggcgtatgtcttaaaaagggcaacgacgatttgaaagagctcatcgaaggtgcgattgataccttatattatgacggcaccatggcgcagctttccgaaaagcacttcggctccgccgccgatgtggacggtgtgcgcaatgtgacggaaaagccggtgcttgacctttctaagcttaaaacacttaaggacggcaccttaaccgtcggcgtggaagtcggctacccgccgatggagtacaccgatgacgcagggcttgaatatcagggcttcgatatcgactttgcaaaagcgctcggcgaggtgctgggcgtagacatcgagtttgtcaacaccgcgtgggacggcatttttgcgggccttgataaagagcagtacgacgtcatcatctcgtccgtgtccattacgccggaacgtcaggccgcgtatgaccttacggaaccgtatgtctcgaatcagcttgtcattgtcacgttgaagtaaaaacgccgattttacccacaaatcttgaaaaatacctatgtatatatgtataaatatacattaatttggcagtttcgctattgacccaaacggattttgggggtagaatacaagtattctaatcgattggtacagtgaaacgactgtatctctttatcggggaaaattgagaaagaaggacaaaacacatgaaaatgaagaaaatccttgctgccgtgctcgccggcgtaatggcactctccgccaccgcatgcagcagctccagtacaaagaagattgaaagcccggacgatttcgccggcgccaaagtcagcgtgcagaccggcaccaccgcccacgacgctctgcagaaaatgcaggaagagggcgttgacgtcgagattctcccgtatgaaaagattacgcagtgctttgatgacgtttcgctcggccgtgcagatgccgtgtacgtagacagcgttgtcgcggcgtattacctcgcagacgacgactctaaattccagagcgtttggaaaagcgacgaaggcgaaccgatgggcgtctgcatcaagaaaggcaacacagaccttttggagcagaccgaaaacgccatcaacacgctttattataacggcaaaatctccgagctcgccatgaagcatttcggcaccgatgtcaccgagggcgtgcgcaacgtcaccgaggaaccgaccgttgacccgagcaaggtcaagaccgttaaggacggcgttttgactattggctttgaggccggttatccgccgcttgagtacaccgacgacagcggccttgtgtatcagggctttgatgttgatatggcagaagagattggtaagctgttcggccttgaggtcgagtttgtcaacacctccttcgacggcgttttcgcaggcctcgataagggccagtacgatatgatcatcgccggcgtttccatcaccccggagcgtcaggaagcgtatgaaatgaccgagccgtacctctccaaccagctcgtcatcgtcacaaagaaggacgcataagcgcaataacgtaaaatgaaaattcggcaggaggccccgttttgaggtctcttgccccatttatatcggaaaggatatcaccatgaacgccattcaacaaatcatcggctggatgccggcgctgctccaggccaccggcgtaacgcttgcgctttccgtcacctccgtgctgacggcactcgtgctcgccgtgtttcttgccctcggcaagatctccaaaaacaccgtactccgctccgtgtgcggtgcgtacatcttcttcttccgcggcacgccgcttctgatgcagctgtttttcctctattacacgctgccgcagctcgttccggcgttcaatattcagagccgctttttggccgcttggatcgcgttctcgctgaacgtcgcggcctacctcgcggagatcatccgcgcagctattcagtccatcgataaaggccagcttgaagcctccacggcgctcggtctcacccactcgcaggcgatgcgccttgtcatcatcccgcaggcctaccgccgcatgattccgccgatctgcaacgagttcgtcatggtgctgaaggatacctctcttgtgtccatcatcgcgctgaccgatttgacctaccagacgaagattatcgcttccaacaaggcgagcgctctcgtttatatcccggctatgatcatctacctcatcatcaccggcgtgttcaccgttattttcaatcgccttgaaaagcgcctgtccatctacgaataaggaggaatacggctatgtctatcattaaaacggaaaatatctgtaagtccttcggctccgtagatgtgctgaaaaacgtcagcctcaccgtagagccgggcgaagtggtcgtcatcatcggaccgtccggcgccggcaagtcgacgtatctgcgctctttaaaccaccttgaaaagcctacgagcggcaagatctggatcgacgacaagctcatcgaagaccgcgtgaacggccacaatcaggtaaagctgccgcataaagagcgcgccgctattttgcttgagatgggtatggtgtttcagcgcttcaacctcttcccgcacaaaacggcactgcaaaacgtcatgctcgccccgatgaacgtgaagggcgtgccggaaaaggaagccaaagaaaaggccgtgaagcttttaaatcaggtcggcctcggcgataagctcgattcctaccccgcaaagctttccggcggccagcagcagcgtgtggccatcgcccgtgcgctcgccatggaaccgaaaatgatgctgttcgatgagcccaccagcgcccttgacccggagcttgtcggcgacgttctgaacgtcatgaaggagcttgcggaagaaggcatgacgatgcttgttgtcacgcacgaaatgggctttgcccgcgaagtggcagaccgcgtggtgttcatgtatgatggcgcgattttggaggaaggctccccgaaggagatcttcacaaatccgaagcacgaccgcacgcgccagttcctgcaaagcgttctgtaaggcgatagcatgtttgaaaatacctcaaaatgcgaagactgcctgtattacgagtacgacgatgagtacggcttctatgtctgcgatatggacttagacgaggatgagaccgcccagttcatcggcggccgctttcaaaactgcccgtactaccgccccggcgacgaatacaccatcgtccgcaagcaaatataataacattgtatgacaaaagctctcccgaattcgtttcgggagagcttttctacatataactatagatcggttgtttacttttcaaatcacttgtgataacatgagaaaaaacaaaggagaatgaaaatggagctatatattttgattggactcattacaattgttcttattttgcagattgtctttcttctcaagaagccaaaaagtgaaaatactgcaacaaatacgaattacgaaagcaattttcagcatattgaaacctatattgccgatgagttttcacgtagtcgaaaagaaacatccgaaagcttaaacagccgtttgagcgaaatgaacgccctgatacgcgaaattcagcaaatcaacacgcagcaaagcgaaaagctcagcacaaccttgacgaagaatatcgattcactactcgagagcaatgaaaagaagctcgaccaaatgcgtcaagccaatatggagcagaatgaaaaaataagcagcgccttaacacaaaacctaaaagctttgcaggaaagcactgagaaaaaacttgagcaaatgcgcgaggtcagcgcacggcaaaatgaacatatcaatgaaacgcttacaaaaagcttaactgctctacaagaaaacaacgaaaagaagcttgaacagatgcgcatgaccgtcgatgaaaagttgacagatacgctttccaaacgtctggacagcagctttaaagtcgtcggcgagcagcttaaaagtgtttacgagtcactcggcgaaatgcgtaagatcaccggcgatgtgacagcgctccagcgcgtgctgacaaatgtaaaagcgcgcggaacatgggcagaggtgcaactcggcaatatactggagcaaacactcaccaaagaccagtacgactgcaacgtatctacgaaaaatgatacaaagcgcgtcgagttcgccgttaagatcccctcccgtgaaaaagacggcgagaccgtatggctccccatcgactccaagttcccgcaggaagactacatacgcatttgcgaggctgccgaaaaagccgataaagaggctctggaagccgcgcaaaaggctctggagcagaacattaaaaatcaggcaaaaacgattgccgagctgtacatcaatgtcccaaaaacgacggattttgccattatgttccttgctaccgaggggctttactcagaggtgctgcgccgccccggcttgtgcgaggaaatccaaaacaagtatcgcatcatgatctgcggtccgaccacaatcaccgcgtttctcaacacgttgaatgtcggtttccgcactatcgcactaaacaaaaagacaacagaaattcaaaagacgctcagtgccgtaagctcacaatatgatttgtttgaatctctccttgctaaagcaaagaagaaaatcgatgaagccggttcaagtatcgaggctgcgcaaaagagaaatacgacaattcaaaggaaactgcataacgtagacaaaatggacgcagatgaagccgaagcactgttaaattccggcgagtgatttcaaatcaaatagaaagataccgcattcagcctacaaaccgaatgcggtatctttttatcaaatgctgtaatcgttgacgaaagtcgcctgctgctgatccaatatatcctgcagggtgatgctgtcgagatattcgttgatggcgcggctgagcccctgccacacaggcagcgtgatgcagtctgcactgcggtcgcacagaacggggtcgtgatcgagacacgcgacgggcgcgagactgccctccgtgatgcgcagaatcatgcccacagtgtatttatccggcgattgcgccagacgatatccaccctgaaaaccgcggcttgcaagaagaatatcggatttattgagcatcggcacgatctgctccagatattttttggagacattctgacggcgggcaatgtccttcagcgcgacgtagccgtcattctggtgctgtgcgagatccagcagcatgcgcagcgcatagcgccctttggtggaaattttcatgcggtatccatcctttatgtaaaatagcgtttccggaataaaacaagcgggctcactgtccgccgcaaactttataccataataacatgtttttagtaggttttcaagagttttatttttgccggtaatttactgtaaaaacgccctctataaactcctttaaactcgcgaaaaagggcaaagcccgaaaaccttgcccctttccctcattcatttttctatcccaaaaatatgtgtttggattcttgtatgctgtatcagtctgcaaacatcggcgtggagaggtaccgttcgccggtatcgggcagaagcgccacgatgaccttgcctgcgttttccgggcgctttgcaagctgtgctgccgcaaagactgccgcgccggaggaaatgcccaccaaaacgccctcgctgcgtgccagcgcgcggccggtcgcaaacgcgtcctcattctgcacggggagaatctcatcgtaaatgtcggtgttcagcgtatccggcacaaagcccgcgccgatgccctgaattttatgtgggcccgccttgccgccggagaggacaggggaggtagccggttccaccgcgacaaccttaacattggggttctgcgacttgaggtacgcgcctacaccggagagcgtgccgcccgtgccgacgcctgtaacgaaaatatcgaccttgccgtccgtgtctgcccagatttccgggccggtcgtcttcaggtgcaccgccgggtttgccgggttcgtgaactggctcggaatgtagctgtttggggtctgctcggcgagctccttcgcctttgcgatagcgcccggcataccctttgcgccttcggtgaggacaagctccgcaccgtaagccttcaaaaggttgcggcgctccacactcatcgtctccggcatggtaaggattaccttataaccgcgggaagccgcaacggaagcaaggccgatgcccgtgttgccgcttgtcggttcaatgataactgcgccgggcttcaagaggcccttttcctcggcgtcgtccaacatcgctttcgcgatacggtcctttacgctgcctgccgggttgaaatactcaagcttcgcgtagattttcgcgttcaattcatttgctttttcgtagttggtgagttcaagaagcggagtgccgccgatgaggtctgtgattttgcgatatacacgcatggtaaagtctccttaaaatactttatataaatgagtttgcattcttgtatcgtttcaggctgcggcgcaacatcgccgactgtacggaaacgggttcatatcgcgtctctcctttgccttgttttgctaagcttattaaacctacttattttataggttatttaacttgcttatatcctatcaccacagggtaaatttgtcaacatcttttttcacttttccttttacctttaaaactcgttgaaacgatccgccgatttgcaatgcaaaatgcagtttcccccatataatagtagggtttccgaaaattttcttcaatttttgcattttaggggttgacaaattgcaatccagcgtgtatcatacaaaacataccaagtcaatatgttttgagtgttatgaaatcttcaaacataaaaattgaagtaaatctcaaaggaggcgcaccccgatgatgcgatcccttttccggcaaatgcttcgccacaatttcagaaacggacgaatgtgaagctcagcttttcgtcaacttctcaaaatccgttaaaacaagaattaaattctgaaattatgaaagaggtattaccatgagctatacatatgataacaactaccattttgaaaccatccagctgcacgcaggtcaggagaacccggaccccgctaccgatgcccgcgcagtgccgatttatcagacgacttccttcgtcttcaagaactccgcacacgcagcagcccgcttcgcgctcgcagatgcaggcaacatctacggccgtctgacgaactccaccgtggacgcatttgagcagcgcattgcagcccttgagggcggcgtggcagcgcttggcgtcgcttccggtgcagcagccatcaactatacgtttctcaacctcgcaagcgcaggtgacaacatcgtttccgcgaagaccatctacggcggcacctacaatctgctcgagcacacgctcccgcagtacggcatcactgcaacgttcgtagatccggatgaagaaggcgcttttgaaaacgcgattaacgataagacaaaggccgtcttcatcgagaccatcggtaacccgaacgcaacgctgattgacattgaaaaggtcgcagccattgcacatgcacataagattccgcttgttgtagactccacattcgcaacgccttacctcctccgtccgttcgagtacggtgcagacatcgttgtccattccgctacaaagttcatcggcggtcacggcacggcgatcggcggcgttatcgtagacagcggtaagtttgactgggagggcagcggcaagttcccgtccctcgtagagccgaaccccagctaccacggcatcagcttcacaaaggacgtcggcgcggcagcctttgtcacgaagatccgtgcaatcctcctgcgtgataccggcgcaacgctcgctccgctgcacgcattcctgttcctgcagggtcttgaaacgctctctctgcgcgttgagcgccatgtagagaacgcgctgaaggttgtcgatttcctctccaagcacccgaaagtcgaaagcgtcaaccatccgtctctgccggacagcccgtatcacgagctttataagaagtatttcccgaacggcggcgcttctatcttcacgttcaacatcaagggcggcgctaaggaagcacaggcgttcatcgacagactcaaaattttctctctgctcgcaaacgtcgcagacgtgaagtccctcgttatccacccggcttccaccacgcactcgcagctcaacgaagaagagctcgcagagcagggcatccagccgaacaccattcgcctctccatcggcaccgagcacatcgatgacatcatcgccgatctttcccaggctttcggtgactgattcaaaacactccttaaaactgatttctccgatatcctattttccgtgtccccacgtcagaaatggcgtggggacatgctttttcccgaaattcggcggctttgcatcttgacatcccgccctatctgtgttagaattttaaggctaataaagttagcttataaagtaacaattcggaggcgaaatgatatgaaacacattcagacgcttgagacccgcaacctgtgcgaaagcgcaaagaacggcggctgcggcgagtgccagacttcctgccagtctgcttgcaagacgagctgcggcattgcaaaccagcagtgcgagaacacggagaagaacgcgaagtaattcaaaggttcagaaaacgccgccttttttggcggcttttttcatgtatagatgcgaaaggattttttagatgatacaccgttataaactcggcggcatgaacatcgtgctcgatatctgttccggctccgtccaccttgtcgatgaagttgcctatgacatgattggcctgttcgaggccgaaagccgcgaggcaattaccgccgctatgctggaaaaatacggcgaccgtgaggacgtgaccgaagccgacgtcaacgagtgctacgagcagattgaagagttgcgcgacgccggtaagctcttcacccccgatacgttcgagccgatggcaggtgcgctgaaagcgaaaagcgccaacgtcgtcaaggcgctgtgcctgcacgtggcgcacacctgcaatttaaactgctcctactgctttgcaagccagggcaagtaccacggcgaccgcgctctcatgtcctttgaggttggcaagcaggcgcttgatttcctgctcgaacactccggcacgcgccacaatttggaagtcgacttcttcggcggcgaaccgctgatgaatttcgacgtcgtaaagcagcttgtcgcgtatgcccgttcccgcgaaaaggaatgcggtaagcacttccgcttcacgttgacgacaaacggcgttttgatcgacgacgacgtcatcgattttgcaaaccgcgagatgagcaatgtcgttttaagcctcgacggccgcaaggaagtgcacgaccgctaccgcgtagactacgccggcaacggcagttgggatcgcatcgttccgaaattccagaagctcgtcaaggcgcgcggcaacaaggcgtattacatgcgcggcacattcacgcacgcaaacccggattttctcaaagacattcagcagatgctcgacctcggctttacggaactgagcatggaaccggtcgtctgcgcaccgggagacccctccgcgctgaccgacgaagaccgcgtcatcgtcatggagcagtacgaaaagcttgctgagctcatgctggagcgccgccgcgccggcaaaccgttcacattctaccactacatgattgatctcaccggcggcccgtgcatttacaagcgcatttcgggctgcggctccggcacagagtacatggccgtcaccccgtggggcgacctctacccctgccaccagttcgtcggcgacgaaaaattccgcctcggcgatgtttggaccggcgtgacgaacacggaaattcaggcggatttcgcctcctgcaacgtgtacgctcaccccgagtgccgcgattgctgggcaagactgtactgctccggcggctgcgccgcaaacgcctaccacgccaccggctccgtccgcggcgtttacaaagagggctgcgagctctttaaaaaacgcatggaatgcgccatcatgctcgaagcctccaaagcattggataacaacgcatgataaccgcgccaatctgcgaatttgtgcgccgctaccgatatagcggcgctttgcgcatgcacatgccgggccacaagggcaccgcgctgctcggccccgagccgctcgacctcaccgagattgaaggcgcagatgtgctctaccacgccgagggcatcatccgcgaaagcgaagcgaacgccgccgcgttattcggcaccaaaaagacggtctattccgccgagggctcgtccctgtgcatccgcgccatgctgtatcttgcgctgctgcatgcccgcgcaaatcacaaaaagcccgtcattgcggcaggccgtaacgcacacaaggtcttcatgacggccgcagcgctgctcgaccttgacattcgctggatctacggcacggaaagcgtcatttcctgcgccatcacccccgcgcagctcgaagacgtgatcgtatcggaaaaccctgccgccgtgtacatcacaagcccggattatctcggcaacatcgcggacatcaagtccctgtccaccgtctgcaaaaaacacggcgtattattgctcgtcgataacgcccacggcgcgtacctgcattttctgcccgagcccatgcaccccatgcagctcggcgcagacatctgctgtgattccgcacacaaaacactgccggtcttaacgggcggcgcgtatctgcacatcgcgcacggcacgccggacatgttcgcgcagcgtgcggaaagcgccatggcgctctttgcgtccacgagcccgtcctacctcattttgcagtcgctcgacgcaatgaatccgcttttagcaacatcttttcccgcacagctcaaagcctgtgcggagcgtcttgacacgctgaaagcaaagctccgtgcgcacggctatgctctttgcggcgaggagcgcacaaagctctgcctactgccgaagtccttcggctacacgggcacagctctggcggaaattttgacgcaccacaacatttactgcgagttttccgacgcagaccaccttgtgatgatgttcacgccggagaccacacccgcagatttcgcccgtctcgagcgcgcgctgctctccgttctgcccgccccggcgatcctttcaaagccgcctgtgccgccgcatgccgagcgtgtactttccccgcgcgaggcgctcttctcgccgagtgaaacgctgccgctttccgagtgcaaaaaccgcattttggcagatgccaacgtgagctgcccacccgcggtgccgcttgctgtatgcggtgagcgcctgacccctgaggtcatctccgcgatggaatactacggcaccaagcactgcacggtcgttgtggaataatcactattttaaaatataaaagtctccgttttcctttttgattaggggaaaacggagactttttgcttctattttatcttgtttgaatttctaaagacagtcgcagaccgcctttcagggaacccatgcaactgtgttccctacgcttgaagcgtccaccggatgtttcaagctaccttcctcgttttgggttaagcaaaaggtgtttcgtcgtttgcgaacgacgacttaggatgttgccccaagaccccaccaattttctcgaagaaagttggacaaagactttattcatcgctccgctatcgttgtcgtaaacgcgtcaaatcttaattttcagccatttgccctgcttcattctgaaatacccaaggcagaatcgcataaattggtcaccgaacagcccaagccacacgccaagcagtcccagtcccagcgggtagcacagcagccagcttaagcccggtcggataatggcgacgctgatcatagacgcaaacgcggtatacttcgtatcgcccgcgcccctcaggcaaccgaagaaaataacctgcgtgatctggagataaatgataacgcacagcatgcgcataatcatcacacccatatcgagaatttcctgctcactcgaaaacaggccatagagattcctgccgaagaacaggaaaaccatcgacatcacaaacgcgcagaaaagtccgattcgctgacacatggaggcgtacagctttgcaagatcgcgccgttcttcgccgagactcctgccgatcagcgccacagacgccaccgaaagcccatcaccgagtgagaacgtcaaactcatcatattcatgccaatctggtgcgcagcatacgcagtggtgccgaggttcgcaacggtgatggcgaacagcaaaaagccgatgcgtaggaaaatctgctccacaaacgcgctggaaccgacgttaagcagggagcgcacgtcaaacttcgaggtaaaaaagcctttcacgccgcggatatatacaaacgaggacttcgcgaacatggaatgcaagctcatcgcgcagccgagcacagagccgatgacggtcgcaagcgccgcgccgcgcgtgccgagcgccggaaacccgaagttgccgccgatcaaaagatagttgaacaccacgttcacaaggttagagaccatgttcgtgcgcagcgcgatctttgtgttgcccgcgccgcgctgtgccgcgttcacgatcatcatcacggtcgtaaacccgatgccacccatgatgatttggaaatactccaccgccgcttcatgcgtatcgtccgccgagcccgcaaagcggataatggggtctgcaaacgccgtaaacgtaacgctgatgatcgccgtcaaaatcacggcgaccagaatgcatgttttcaaaatgcgcaccgcgctttcgcggttctgctcgcccctacgccgtgcaaccagcgccgagatggccgtgctcatcgacataaacagcgccaaaccgatgaacttcggctgctgcgtcaggcccaccgctgcaatggcgtaagagcccagcgtgctcaccatgatggtatcgataaagccgacgagcgccaccaaaaacgattccaccatcgaaggccacgccatgttgatggtcgttttgaaaagcgagttcgtagacggcagctcgcccgtcacaggctcgccgtgcaaaacatgctgtgcgttaaagagttccaaaagtattcacccattcccaaaatagttgcttttgaaacattatagcattaaaaaagaagccggtcaagacgcgtaccgtttatttgtacgcagttcgaccggcttttcaactgttatttgtttattttgtggcaagaagcactgccgtgttggatttcgcccagcacacgcgtacctctgcaaagcccgctttgaaaagcagtgccgcttcgcccgccacatactgcggtgtaaagcaatagtaatgctcgtctgccgacaaatgctgctccttgcgcttctgctcaaactcggaacggcagaagtcctcatacatctgcgtcggcgcgaatttgtcgctcaacagaaagaacccgccctttttaatgctgcggcacacgcggtgaaacagctccaaattctcttcgcggctgtaataatgcagcgccatcatggaaaccgcaccgtcatagctttccggctccaactcatatttaaagaaatcaccacaaatcgtgcggatgcgctccttgtgctccggcagatttttcggaatttccgagagcatcttatccgcgcagtcaatgccgtccacataaatcgtcgggttctgctctaaaattgccgtaagacccgtgcctgtgccgatgccaatgtccagaatgtgcaggtgctccttcttcgggaaaaactccgccgtgcggcgaatgtagccgtcttcatcctctgcgctgcgtttcaagcgctcgtcataagactccaccgcgccgttaaaataactgtcgatcctttccagtggcatatgcacaccaatcctttcctgccgacgcaatactctaaacgatagttttgcgtcaggcgcataagctatgcaaaacttttgcgatatttttcatttacccattattactattttactggaaattcgctcaccttgcaacttggaaaaacgacaattctgcgcgggcttcggcaaaagatattggactaatccatgaatatcccgctgaataccgcggtttacgcgaagatcatgcgaccaaaatcctgcggacgatggaaatccggcgtttcgctcgtcgtctcattccacatcatatagtgcggctgcacggtgaggtcgccgcatttaaagcagttcgcgcggatcacacgcccgcttttaaagtcgtaatcggggtaaaatacatgcagaaattcgagcggaatttcataaaagatttcccacccgtccgccgttttgttcgtgcggatgttaaaaagcttcttgtggtcttccgggatcaaacggatgctgtctgctctgccgtggccgaagccaaggaaaatcgcgccgttcaagttcagctcaatgttaaaataccgcccgtcctccggcaccggggaaaagaaaaactccatgcagctgtccgtgcagatgctgccgagcttatcggtcagctccgcgcggatgttcttttcgtgtgccacctgatgcacgtagattttcttgtcgtcgtagcagatctgctgctccatgcgcacgcccgcgtccggcaaccaacaaacattgtccacctgcagctccgacacctttgtccagtccggcgcacccaccgttttctcaatgacatactctttcatattcatacagctcctaaccgttttccgcccatcgcggtttttcatggctttattataccagattttgccgcaaaacacaatcattccataaaaacaggcgctcccgaaaaacggaagcgcctgcgaaaaagctattctaattagacctcgtgcgggtactttctcatgtaggaaagcagctcgtcaacggtggtgaaggccatgccggtgacggtgtcggcagcaccatagtagatggtgatgcggccggtgtcggcatcggtcagggtagcgcacgggaacgtaacgttcggcacgtcaccggtgagctcatagctctcttccggaccgaagacatagaagttgcctctttccttcacgatccacggcttctcgtggtcaagaagcgctacgccgaagcgataaacgaagccgttgcaggagttcagaacgccgtgataaatcatcagccagccttcatcggtctcgatcggaatcgggccggggccgaccttcttggactgccagccggagtgactgctcgtgccgaagacatagcggtgcttgccccaatacgtcatgtccgggctctcgctgtagaagatgtcgccgaacggggtgtgaccggtgtcggacggacggctcagcattgcaaagttgccgttgatcttcttcgggaacataacgccgttgcggttatacggcaggtaagcgttctccatctgatagaaggtcttgaagtcataggtatagcctacgccgatcgtcgggccgtggaagccgttgcaccaggtgatgtagtaacggtcctcaatccagcaaacgcgcgggtcatagcgatattccttgcgggttacgcacgggtcgcagccgggagccggctggaactcgatcggctcgtggttgatcttccagttgatgccgtcatcagagaagcctgcgaagatgtccatctcaacagagcggttgtcgcagcggaaaacgccagcgaacttgccctcaaacgggacaactgcggagttgaagatgctgttggaagtggggatgagatcacgcggaatgatcgggttgtggtcataacgccaaaccggcttatcgtagccctgcggcttatcctgccacgggatgttcgggagtgcattgccgataattttagccattgtagtttcctccattttatattttttcaaaagacatttgaaagcgaacacatacagtcctttacaatgtgtaaccgcttccatatcacattaactataatacaaaccaagagaaaagtaaagctattttttccgaaaaaaccgtttctatcacaattccaccaaatttcatcgccgcctttagcaaaatgccgaagcccacgccgtacaccgcatcacaaaccgccaactttatgcaacaaatgcctattgcgcaaaagccgcataaacgatatactgttgttataaacggatatttctctgcccgaatttttatgttttcccgaaaggaacgattttatggcgattttatttgatgccgaaaagaaaattttcaagctggataccgctttctccagttacgtttttgccgtgcatgacagcggccgcctgctgcacctctactacggcgcatacctgccggactgcgacatgcgctatttattggaccgcggctacttcggctccttcacgcccgacgccgcaggctacgtcggcaaggagttttccccggatacacagccgagcgaatattcctgcaacggcaccggcgatttccgcatctccgcactccaaatccgcaacgcagacggcaatatcgcgaccgacatccgctacgtttcgcaccgcattttaaacgaaaagcctgcgctgcccggcatgccgtctctgcgcgacgaaaacggtgacagcgaaacactcgagatcaccacgctcgaccaaacgacgaacgccgaagtgaagctctactacaccgtttacaacgatctgcccgtcatgacgcgtcacgccgtcgtgacgaatacgtccgaccgcaccatggagcttgagcgtgtgttcagcgcctgcctcgacttcaacacgatggattacgacatggtgcacctttacggcaagtgggcaaaggagcgcaccgttacagagcgcccgctctgccacggcattcaatccatccagagcaagcgcggctcctcctcacacaaccacaacccgttcgtcgcactgaaagcccacggcgccaccgaagaaaacggcgaagtctacggcgtcaacctcatttacagcggcaacttttccattgaagccgaagtggattgcttgaacgccacgcgccttctcgcaggcatcaatcccaccgatttcacctggcgcctggagccgaacgaatccttcaccgcgccggaagccgtcatggtctacaccgataggggcctcggagagatgagccgcattttccaccgcacctacatgaagcacctcatcaagagtccgtggcgcgatgtagaacgccccgtgctcatcaacagctgggaggccgcatacttcgatttcgatgataataagcttgtcgcgttcgcacacgaagccgccaaaatgggtgtcgatatgcttgtcatggacgacggttggttcggccaccgcaaaaacgacgactcctccctcggcgactggtatgtcaacgaaaagaagctcaaaggcggcctcagctccctcatcgagcgcgtcaacgcagagggcttaaagttcggcatctggtatgagccggagatgatctctccggacagcgacctctaccgcgcccacccggattggtgcctgcacgtgccgaaccgtgaaaactcccccgcacgcttgcagtacgtcctcgatatgacgagaaaagacgtgcgcgataatatcttcgcgcagatgtataaagtcctcagtgaaaataagattgattacgtcaaatgggacttcaaccgcaatctgaccgaggtcggctctgcgctgctcccgccggagcgccagaaggaggtcatgcaccgctttgtgctcggtacatacgacctcatggatcgttttgtcaaagcgtttccgaatatcctctttgaaaactgctccggcggcggcggacgtttcgatgccggaatgctgtattattccccgcagatctggtgcagcgacaacaccgacgccatcgagcgcctcaccattcagttcggcacgtccatgtgctaccctatctcctcgtttggcgcacacgtcgcagcccgcccgcgcacctcgcttaaaacccgcggcaacgtcgccatgtgcggcacattcggctacgagttagaccccagaaagctcaccgatgacgaaaaagccgaagtaaagcagcagatcgccgactaccgcaaatatcactgccttgtccgcgagggcgatttctaccgcctcgtctccccgaccgagaacgacttctactgcgcgtgggagttcgtttcgccggataaacaggaagccatgatgactgccgtcgtcatgcgtcagcccgagacccgttactgcgtgcagcgcctgcgtggcctcgaccccaaaacgtactatcaggacgaggagaccggcaccgtctattccggcgccatgctgatgaacgcaggccttaatttgacaagagacgtctacgaagacggcaccagcgtcacaaagcactttaaagctgtaaagtaaagccgccgaaatccacaataccgcaacgttaaaagtctttgattaaactttcttcagaaagtttatgggggctcggggcaacgccccaagtcgcgctccgcagagcgcgaaacactttttgcctccacaaaaccagaaccgtaggaaacccagttgcatggattccctgcatgatttgccccgcaaatcattagaattaaatgaacaaagcaggaccccgtaaacacacaacgtgcctacggggttcctgctatataaatcataaaaaaatcgacttatttctcatccgcatgcgtgctgttcatcaggcggataagtgccttctgtgcgcgttcctcgcataccgcaataatctcatcgcccgcttgcagcaccgtgtcgccgcccggaatgatgagcttgttatttcgcacaatggaaatcagcagcgcccccttcgggaacaccacctcacgcaccgacttgccgtgcaaagccgaattctctccaagcgtcacggagcaaatctgaccgcggcccttgttcagcgatgccacaagatgaaactccatcaggttcgcttcctgctcgatcatctgcgcaatgatctccgtgctgctcaccgcataatccacgccaagcacacgcatcgtctccaaattgcgcgggtcgttcgcgcgggcaatcacttttttcgcaccgaaatactgctttgcaagctgcgacgcaacgaggttgtccgcatcgttgccggatatcgcaataaagcagtcggcgtcccgtacaccggcgttttccagcatgtcaatgttcgtgccgtcgccgcagataatctccacgtccagcgagttcgcaagctgtaagctgcgcgcgcggtcgctctcgatgatacgcacctcgtggcggcggccctccaaaatgcggcgcgcaaggctttcgcccaccttgccgccgcccataatgacaatgttcatggcacattcccccttaatcgattacgcggctgtacacaatctcgtcgcctgcctcgagcttcaagggtgcaagccccgctaaaacgaacgcgccgcttttgcggatgatgccgaacaccacttcgcccgggttgccgcgcagttcgtccacattcttgccgatctgatgccgctccgccggccgcacgtcaaagtcgaccgtatgcagaccgaactcgagtttcttgttcattttttctccgctcagcatccgcacaatgcggtcgccggcgtggtttgtggggcaaatggtatgcaatcccatatgctcaaaaatcaattcacgcgcggggtcggaaacacgcgccaccacgttttggataccgaagtaatcgcgcgcaatctgcgccaccgtgatattgaggttatcgtccgccgttgtcaccgccaccgcgtcgcagctttcaatgcccgcttcgcgcaggttgcgaatatccatcgggaacccgcggaatgtcacgccctcgaaatcgttttccaaaagctccaagtcgctttcaatgttgcttaaaacagaaacgtcccaacccatttcgtccatggtgcgggcgatttttcgcccaagcaggccgcagcctataactaacacattcatagtttacctcagcgtcgctccgggtcttccgtatcgcgaatggtctctgccgtcatgccgtctgatgtgctgccggagctcgtattctctcggttaccgccgtttacgatgataggattattcgcattcggcgtcggctctgcggtgggagcgggtgtcggcgatgcctcgctgcccttttgcgcgtcaccactgtccccgttgtcatcggtcgtgccgtcttccgcattcggggtcggcgagggcgtcgcggtcgcaagtgcggtcttctctttctcactgatcgtcacaaattccgcgaacacatacgcattctgcccaaagtaagagatttccacccactcggaggtatcgtcctgtgccacaacctcgaacgcctcgccggcctctgccgtgccgagaatttcggaatccgtcgaagcctcgctgcgcacattcaacgaatcgtcgatgtcgttgatggtcgccaccttcactttttcgaccggcatggacgttgcggtaggctccacgctcggagaaggggagggctccgccttggcgctgcccttgccgcacgccgcggtgccaaggattatcacagcgcacagtgccgccgtgaccgccgttttcaaaatgtttttataatggatgcttcgtttcataaaagctcacttcgcctttcttttttcggcgcgcattcaaaacgccgccggaacagaagatgatttgtcattagctattttaacacagttcaaagaaaaatccaatacttcgcccggttttttcatttcttttgcaaaaatcacccgcatttcttgccattaccccgaaaaagggctataattacagggaatattttgcttggatattggagtgttcatcatgttaaaacccgaacagatcgcgtccgtcaagggccgcggcttcctcatcaatcgcggcacagagtgcttctccggccgtctcgtctgcgccggcgcggtcttcaccgctgctgacctgcgcaccatctccgagattgccgaaaaattcggcagcggcaaggtgacgttcacctcccgcctgtccgccgagatcgtcggcatccccttcgagcagattgacgccgcctgcgattacgctgccgagcgtggcctctacttcggcggcaccggcgctaaaatacgccccgtcaccgcatgtaagggcaccacgtgcgtctacggcaactacgatacacaggcgctcgccaaagagctgcacgaaaaatactacgttggctgggcaaatgtcaaactgccgcacaagttcaaaatcggcatcggcggctgcccgaatagctgcatgaagccttctttaaacgatttcggcatcgagggccaccgcgtgccgatcttcgacgaagacacctgccgcggctgcaaggtctgcatggtggaaaagtcatgtccctccaaggctgcacacgtcgaaaacggcaaattacatatcgatgaaaagtgcctcgcctgcggcgtctgcaccggcaaatgtccgtttaaggctgtccgccacgaaagcccggtcgtttaccgcatttatgtcggcggcacgtggggcaagcaaacgcgcatgggcacgccgctcagccgcttcgtcacccgcgcggagattgagcctctgctcgagaagaccatgctctggttcaaggaaaacgccatgcccaaagaacgcctcggcaaagctattgaccgtcttggcatcgaaaaattcgagcacgacgtcttctccgctgatcttctgaaccgccgcgaggagatcctcacaaaataattccgaaaggataccctatgaaactcaagttcctcgcagcgctcgcgctttccgccgtactgctcctttccggctgcgccgccccggcgcaaaacgaaaccacccctgaaatttcttccaccgcttccgaaacgaccgccgtctccgagcgcgtcattacggattcctatggcaccaaaacggagctccccgctgatccgtgcgtcgtctccctttacggctcgtttgccgagtgctggctgctctccggcggtaaactcgccggtattaccgaagatgccgtagacgagcacggcatcgaaatcgatgacgacaccgcgctcgtcggcaccgtcatggagccgaatcttgagagcgtcgcggcactctccccggattacgtgattttatccgccgacctgcccgcccacgcggagctcgattccgccctcaccgatatgcagattccccatggctgttttcgcatggataacgtcatggattatgcaaagatcatgctgaatttctgcgccgtcaacgacccggacggtgaaaaatacgacgaaaacgtcacgcaggttttaaagcgcattgaatctataaagcaggagacagccgaaaagctctccggacagaaagctcccaccgtcctgcttttgcgcgcttattccaccggcgtcaaggccaaaggcgaagacaccgttgcgggcgccattttgaaagagctcggtgcgcacaacatcgcagacgataacgaaagcctgctcgaagacctcagcttggaatccgtcatcgaagccgacccggactacatcctcgtcatgacgatgggcagcgaagaaaacgccaagacctacatggcagagaacatcgaaaataaccccgcgtggagcgaactctccgccgtgaaaaacggccgctacatctatctgccgaaagaccttttccactataagcccttaaaccgctgggacgagagctacgcatacattgcaaagctccttttgaacgaagatgcgtaagaaaattttatttcccgcagcgctcctgctgctcgttttctcctttgtgctgagcctctgtgtcggctcggcacaaatttctattcgcgaagctgtctctgccctgcaaaacggcagtttaacgcccgacagccgcatcctgttctacgtgcgcctgccgcgcgcccttgccgccgtgctctcgggcgcagcacttgcggtctccggtgtgctcttgcagaatgtcttaaataacgcccttgccgcaccgaacatcatcggtgtcaacgccggggcgggctttgccgtgctgtttttgctcgccgtctttcccacagccaccgcgtttttgccgtttgcagcattccttggcgctcttttcgcgtcgctgctcatttatgccgtcgcggcaaaaagcggtgcttcccgcacaacgatcaccctcgcgggcgtggccttaagcagtgttttcaccgccggcagcaacgccataaagacctttttcccggataccatctataattccagctcctttttcatcggcggattttccggcatcgcatacaaaaatctcacccccgcgtggattgccatcctgcttggtctgctccttgccgtgctgttttccggcgaaatggacgttctctccctcggcgatgagaccgcgcagtcgctcggcatgcgtgtgcaaggaacacgctttctcctgctcatgacggccagtctgcttgcaggcggcgcagtcagcttttcggggcttctcggcttcgtggggctcattgtaccgcacatcctgcgccacttcatcggcgcgcgccaccgcatcttagcgccgctttcggccctcttcggcgcgtcgttcgtcttattgtgcgataccctcagccgcacgctgttttccccgtatgagattcccgtcggcatcgtactgtcgctgctcggcggcccgttcttccttttcctcatcgtgcgcaaaaaaggaggaaaactcgaatgaaccaaaacctttccaccgccctaaaattcgctgacctttacgtcacgttaaatcacgccgaaattctccgcggagtctcgggcgaactccgccgcggcgaagtcaccggcatcctcggcccaaacggctgcggcaaaacgacgctgctccgcgcgctctgccgccttattaaagcggattccggcagcatcaccctgtgcggcggtaccgcggaaaccgacattgctgcccttgcccccaaagctctcgcgcggcgcgtctcgttcctgcctcagcaaagggccgtgccggacatcaccgccaaaacgctcgtctcccatgggcgctatccctacctcggcttttcgcgcacgctgtccaatgaagaccgcgctgtcattcaaaacgcgcttaaaactgccggtgtgtcggcctttgccgaccgccgcctgcccatgctttcgggcggcgaacgccagcgcgtgttcctcgccatgcttttagcgcaaaacaccgacgtcgtcctgctcgatgagcccactacttaccttgatgcacgccataaattcgagctcatggcgctcctctctacgctcaaagcgcaaaacaaagccgtcggcatcgtcctgcacgagctccccctcgcgttcaagttctgtgaccgcctgcttctcatgaaaaacggtcaaatcatgcaaagcggcacgccggaggagctattaaaaaccggccttatcgagcacctgttcggcgtttccctcacccccgttatgctcgacaaagaggtggagtacatcgaacgtaaaattcacagttgacatttcgcacttttgcgtgtacaataagaccacaagctaaagtacttttgtgactgacggaatacaagatggggacatcgtggagcaaaagtatgaaaatgagccgaccgtctgggcagtgttttgaaagcactgccctgtttttatgtcagcagcttccaaaacaaggaaatttgcacggcaaaacgccggaaaggaatgggaaactatgaacgcttggagagattttaaaggcggtaagtggcaggaccgcatcgatgtccgcgacttcatccagaaaaactacaccccctacacgggcgacgaaagctttttgcagcccccgaccgcacgcaccgaaaaaatgctcgaaaagtacgaggctctctgccgcgccgagcagcaaaacggcggcgttttgaacatcgataccgaaactgtcatcaccgccacgtccttcggtcccggctaccttgataaggaaaacgagatcatcgtcggcctccagaccgatgagccgttaaagcgcgcttgcaacccgttcggcggcatgcgcatggtgcgctccgcctgcgaagcctacggctacaaggtctctgataaaatcgaagaggagtttaaataccacaagacccacaacgacggcgttttctctgcctatacggatgacgtgcgcgccgcacgccacgccggcatcatcaccggtctgccggatgcctacggccgcggccgcatcatcggcgattaccgccgcgttccgctctacggcgtaaaccgtttgattctccaaaagcagaaagataaagccgacctcggcaaaaatcccctcacggccgataccattcgcctttccgaagaagtcaccgaccagatcaccgcgctcaaggacatggtgaaaatggccgccatgtacggttacgacatcacccgcccggcagaaaacgcccgcgaggctgtgcagtggctctatttcgcatatctcgccgccatcaaagaacagaacggtgctgccatgagtctcggccgcacctccacattccttgacatttattttgaacgtgacctcaaagaaggcgtactcgatgaatccggcgcacaggagatcatggacgatttcgtcttaaagctccgcatggcgcgccacctgcgcacacccgaatacaacgagcttttcggcggcgaccccatgtggatcaccgagtccctcggcggcaccggcgaggacggccgcacgctcgtcaccaaaaactcttaccgcatgctccatacgctctataacctccacccgtccccggagccgaacctcaccgtgctgtggtcaaagcacctgccggaaaactggaagcgcttcgtcgcgaaggtctcctgcgataccgatgccatccagtacgagagcgacaccgttatgcgccccgcattcggtgatgattacgccattgcctgctgcgtctccgccatgcgcgtcggcaaagatatgcagttcttcggtgcgcgcgcaaaccttgcaaagctcgtactgctcgccatcaacggcggcatggacgaagtgaaaaagacccgcgtcgcgcctgaaatgcctgtctggccggacgaatacgtcgatttcgacggcctcctcaaccgcctcgatttctaccgcgattggctcgcaaaaacttacgtcgatgccatgaacaccatccactacatgcacgacaaatacgcctacgaaaagagccagatggcgctgcacgatacgaatgtccgccgtttgatggcgttcggcatcgccggcatgagctgcatggcagactccctttccgccattaaatatgccaaggtgcgctgcatccgcgaccccgagaccggtctcgtcaccgacttcgagaccgagggtgagttcccgtgctttggcaatgacgacccgcgtgtcgattccatcgcctgcgagcaggtgcgccgtttctacgatgccctgcgcgaatacccgctctatcgcggcgcacagcacacgctgtccattttgaccatcacctccaacgttatgtacggcaaaaagaccggcaacacgccggatggccgcaaactcggcgagccgctcgccccgggcgcaaaccccatgagcggccgtgataaatccggcgcgctcgcagagctcaactccgtcgcaaagctttcttatgattattgccgcgacggcatctcgaacacgttctccatcattccggaagccctcggcaaaacggaggaagaccgcatcacaaacctcgtccagctcctttcgggctacttcattcagggtgcgcatcacctcaacgtcaacgtcatgaaccgcgaaacgctcatcgatgcctaccataacccggaaaaataccccaacctcaccatccgcgtttccggctacgcggtcaacttccaccgtctctccaaagagcagcagcgcgaagtcatctcccgcacattccatgaggcaatttaatggaaggccgcgtcagctccgtacagtccatgggcgcggtagacggccccggcctgcgctacgtcgtctttctgcaaggctgcccgctgcgctgtgcctactgccataaccccgaaacgtgggacttaaccggcggcacgccctacacagcagaggatttctgcaaaacaatcctccgttaccgcccctatttcggcgaaaatggaggcgtcaccgtctcgggcggcgaaccgcttttgcagcccgagttcgtcgcggaattattccagcgcctgcatgaacacagcattcacaccgcgctcgataccgccggcgccggcgacctttcccgtgccaagcaggttctcaagcacacagacctcgtcctttgcgacatcaagttccccacggaagcgcagtacaaatcccactgcggcggctccttgcagcacacggtcgatttcatgcgccttacggaatcgatgcatattcccctctgggtgcgccacgtcgtcgcgcccggtctttccgatacggttgagagcctccgcgccgtcaaagctctcgcggagtcgttctccaatttggagaaaatcgagtggctgccgtttaaaaacatctgcgccgccaaatacaaggcgcttcatatcccgttccccatgggcgacaaaccctcgttctcacaaagccacgtcgaagcgctcctttcaaagctataatttcatccaaaaaggctgtcccgcactttgccgggcagccttttcgttttcatctctatttccgttttgatatagatttatacaatttttgaaaagttcacaatttcaatcgtcacagccacgcgtttttatgctataataaaagtgattttcgttcaaccaccccacaacacataagaaaggtcgtgaggcatcgattgaagctaagacaaatcctctctgaaaaatggaaggaagcgcttcaggctgtccttcccatcatcaccatcgtgctggcgctctcgttcaccattgcgccgctctcgccaagcgttctgctgtgctttttaatgggcgccgtgctcattttagtcggcatgatgttcttcaccaccggcgcggagaccgccatgacccccatgggcgagcgcatcggtaccgccatgacaaaaacgaaaaagctcggtgtcgttatcacgctttcgtttttgctcggctttatcatcacggtctcggagccggacttacaggtgctcgcatcgcaggtgccgtccgtgccgaatttaattctcattctatccgtcgcatgcggtgtcggcgtgtttcttgtcgtgtcgcttctgcgcatgctgttttctatcgcgctgccgccgctgcttgtcggatgctacgccgtcgtgtttcttctggcgttctttgtcccgccggaatttctcgccgtcgcgttcgattccggcggcgtgacgaccggccccatgaccgtgccgttcatcatggcgctcggcgtcggcatctcggccatccgcagcgaccgccacgcggcagacgacagcttcggcctcgttgcgctctcgtccatcggccccattttggccgtcatgatcctcggcatcatctacaatccgaatgaaagcacctacacgccgcccatcctgcccgaaatgcaggattcctcggagcttttcgagctgttccgcaccggtatcccgacctacctcatcgagattgccgtctctctcctgccgatcattctctttttcctcgcggcgcagtttctcgttctgcggctttctaagcgcaaattattccagattggcatgggcctcgtttatacatacatcggccttgtactgtttcttaccggtgcaaatgtcggcttcatgcccgccggtcattacctcgggcagcagttagcttcctataaatattccgctgtcgtcattcccgtcgctatggtcatgggctatttcattgttcgcgcagagcccgccgtgtacgttctcaatcgtcaggtcgaggagatcacagacggcgccatctccgccaaggccatgggcatcgggctttctgtcggcgtgtccatctcgcttgggctcgccatgatccgcgtcctcaccggcatttcgattttgtggttcctcatcccgggctacgcgctcgcgctcatcatctcgttttttgtcccgaagatctacaccgccatcgcgtttgactccggcggcgtcgcttccggccccatgactgcggcatttctgctccccctcgcacagggcgcgtgcacggccgtcggcggcaacatggtcacagatgccttcggtgtcgttgccatggtcgccatgacgccgctcatcaccattcaggtcatgggcctcgcggcaaagctcatgcagcgccgtaaaacggagaccgccgcacccgccgcattcgccgatatggacgaaaacgcaatcatcgaactgtaaaggagggcgtttatgggcgacaatttatactggatgattaccattacagaccgcaaccaaagccagaaatttctgtcattttataaaacctatgggatcgaggtcgtgctcagcacgctcggcaaaggcaccgccgcgtccgaaattctaaacgatttcggacttgaagccacgcaaaaagccgtgctgctttccgttgtcaccggcaaggtctggagtgccgtgcaaaagggactgcagaccatcatgctcatcgatattcccggcaccggcatcgcgttcaccatgccgctcagcagtatcggcggcaaacgtcagctggagtttttaacgaacggtcagccgtttcagaaaggagaggaaagcgtcttgaaagataccaaatacgagcttctggtcgtcatcgcaaaccagggctataccgagcagattatggccgcagcgcgccgcgaaaacgcaggcggcggcaccgtcatccacgcaaagggcaccggcatggagggagcggaaaagttcctcggcgtttccctcgccagtgaaaaagagcttgtgctcatcgtcgtaaagcacgcggataaaaacaacgtcatgactgccattatgcaggaagccgggcttgagaccaaagcgaaagccatcgtcttttccctgcccgtcaccggcactgccggccttagattacaggacttaaacgaagaaaacacataaaacaacgaccgtaacaaaatatctgcacataacaaaatcaccctcgccggaggaaatccgcgaaggtgatttttgtcattctattattatgttggcaaagagaatatctgattgatcaaatcagcccttaacagcgccgatcgtgatgcccttgacgaagtacttctggaagaacggataaacaacgagcaccggcagaacaccgacaacggcgattgccatcttgatgcccgtgctcggcatgttcgccgtaatctcagctgcagccgcagcgtccataccgctcttcagcgcctgcacgtctcgcagcatgtcattcaaaagaacctgtatactgtaaaggctcttgttctgctggagatagtaaagaccgtttttccaatcgttccagtaggaaagaccgataagcagtgtcatcgttgcaaccatcggaatgctcatcggcagaacgatcgtcagcaggattctgaactcgcccgcaccgtcaatgcgcgccgcttcaataacagcttccggaatgttcgtggagaagtacgtgcgcatcatgatcacgtagaacgcgttgaccataagggacggaatgatgagcgcccaaatcgtgttgctcaccttgatgtaacgggtgtacatgatgtacgtcggcacaagaccgccggagaacagcatcgtgaagaacacgtagaacgcaagaccgttgcggcccggtaggtcgcggcgggacagcgggtaagccatgaggatcgtcatggaaaggccgcacagcgtacccacaactgtggagaggattgtgatgccgtacgcggagataatcttgttgctgctcttaaacatgtactggtaagcattcagacttagtgccttcgggaacagcgtgtagccgttgcggatcaattcctgctcgtccgtaatggaggacataatgagcagaaggaacgggaagatgcagcacagggaaaggatgatcatcacaatgtgtgcgccgacctgaaaccctttgtttttttcgaccatggtgtttctctctcccttccttagaacagtgcgttctcttcgccgccgattttcttaacggcaaggttcgcgcacaggaccagtataaagccgacaacgctctggtaaacgcctgctgcggaagatctgccgtaatcgttcagcgtgatgagtgcgcggtaaacgtacgtatcaatcgtgctcgtaatgtcgagcagcgggccggaatccatcggcacctgatagaacagaccgaaatcggaatagaaaatcttgccgatagacatcagtgtcagcgtgatgatggtgggcagaaggctcggcagcgtaacgtgaacgatctgctgccagcggtttgcgccgtcgatgaccgccgcctcatagtaaccgtggtcaatgccgacgagcgttgcataatagagaatgcagtcgtagccgaacaccttccagatatgtacgatgaccaaaatgaacggccagtacttcggctctgtataccaggaaatcggattaatgccaagtgccttaaagatcgtgttgttgataaagccggattcagagctcagcattgcgaacaccagatagctgaccacaacgatggagatcaggtacggcatcaggatgatggtctggtacacctgcttgaagagcttgctcgtaatctcgtttaagagaatcgcgattgtaatggcaatcacggtgcccagcacgataaagcacaggttataaagcagtgtgttgcgcgtaatgttgaaagcgtccttcgttttaaaaaggtaggtgaagttgctgaaacccacccagtcacttgcaaggatgcccttacgccagttgaccttcttgaaggcgatgatcagaccgctcatcgggatatacttatccatgagcagatacagggcgcccggaaggaacatcagatacagcgggatgcagcggtaaaagcgcagccacttattcggttttgccgagcgcactttcatttctttttccagtgcggcagatttattcggcataattagaaacccctttcaatctgttttcgtcctgctccgttgaaattttccaaaagaacatgggcatgtacagaagggtcatctctctgtacacgcccatgcccttttccctttcgggaaaaagacacggattttcacaaggaagctgaaacgaatctcgctccagcttctttaagtctaattgtgaagtaaattacttctgctcagccagccaagcgtcgagctgtgcctgcttctcttcgatgatcgcatcgatgccggcatccttcagctcagagttgaactgcgggagagtcgtctccgggtcaagagcgccgcaaacgagtgccttgtggtacttgttaacaacgttcgtgcaagcggtgatctcgttcgcaacctgcgttgcgtcgaaggagaagccgaatgctgcggacttctgagactcttcgttgaaggtcttcgttgcatcccagtaatcagccgggagatcggtgccccagatgtcgccgatgaactggttcggcatcagccaagtaccggactttctgtaagtggtggtcgttgcatcaacgccgtccggatagttgattctgtcctgaccgttcgtaacagcgccttcttcgattacttcgtagtgaacgccctcaataccgtacatgtagaggttgctcagctccgggttgctgtaaagctcgttcagagtcttcatagcagcttccggatgctcgcagctgcctgcgatggaccacagagccatggtaacacggtcggtggaagccagtgccggaatcagctcaaccgtgccgatcgggttctggaggttcgcgttgttctcttctgcatagtacggcttcaggttaacgaagctgccgaatgcagtgcctgcgtcctgcagagtggttgcagtctcggtggtgttcacagcgtcagcctgaatgaggccttcctgcatccagttgtacatcgtggtaacgaggttcttgtactgctcggtctcgtagaggttcacaacggtggtgtccgtagccatgtcggagagaacaccaaggttaaccatctcgtcgcccagagagtcccaaccccagttacggatgttttcgccggcggaaacagctaccggccagcagttctcttctttttccttaatggtaacgagaacatcgtggaggtcttcgagggtcttaacggaatccatgtcgaggttgtacttctcagcaaggtccagtctgtactcaaagccctgggaagctgcaaggtcacggccctccgtgaggccgaacagctcgccgcctacgcgaccgcagttgatgttgtcccaaccgagctgctcaatgatgccctggccatactcctcgatgaggtcgtccatcggatagagctgaccggaatcagcgcaagccgtgtagttgaccatgtaaaccgggagaaggtcaacgccttcgccggaggaaagcatcagggagatctggtcagcatagctgctgtacgggaggaaggaaagcttaacgttcacgttgaacttctcttcgaggatcttgtccattgcttcctcaacctgtgcgataccggattcttctttaccggatgacatcgtcacgatattgagcgttacgagttcggattctttcagatcttctgcttcggaagaggcatcgctgctatcagctgcagcactgtcagaagcggaagattcggaagatgtgctggagtctgcggtggagctggaagaaccgccgttgccgcaagcagccagggagagggtcagcgctgctgccatgagcattgctacaagtctctttgccattttcttacttcctttcatacttttcgacctgcgataaatttatttttagccttcgcggtcaaattacacatatatagtaacagaaaatccgcatcttttctgcaaatttcgtgacatctcctattcaaaatgtgacatgtttgtgaaggctttgcaggatgttctttacaatcctgcatatcgatactctatatcgataaaaaaagaggaaaacccatatgggtgtccctctctcaaatgcaagatgtattttctgtctttcacccgtttacacggattttacattttgtgacagttttacaacagtttaccgaaagaaaacgtgctttacagcttagaccgccgctttgccgcacggtattccaccggcgacatgcccgtgtatttcttaaaaacctgcgaaaaatacgagaaattcgagtaccccaccttcgtcgcaatgaggctcaccgggatgtttgtgtcactcagcaaagactgtgccgcgcacatcttctccgtcacaatataatcatttaaagaggcgcccgtttcctttttaaataagcgggaaagatattccgggttcaaatagattgcgtccgcaatctccgcgcggcttaaatccttgtcgatgtttcgccggatatacgtcatcgcgcgctgtatcggtgtctgctccgtcttgtccggttccttctccgcactttcgtcctcgccacggtacttcgcataagcattgtaccgcctttggttttccgcttcgcgcacttttccggccgcacgctccaccgccgcctcaatctccgcatacggcgcaggctgcaaaatgtagtcaaagctgccaagcttcacggcctcctgcgcatattcaaattccgcgtgcgcagaaaggaaaatacacaccaagccggaaaaccgctcctgcgcccaacgcagcaaagcaaagccgttcgtcggcggcatttcaatgtcacacagcagcacatctatgcgctcgcgttcaaaaacgctttgcgcttccttcacgctgtacgccgtaaacacctgctccacgggtatttttttccagtttacaccggtcaccatgctctccacaacctccggctggtcatctacgatcaatacgttcatccgttgaaagcctcctctccgtccggctcgtcctccgccgcatgcagcattgcgaggtctatcggaatcaaaatttcagatacactgcccatgcgttcgcccatatcccgattaaagaacgcatataaagcgcggtcaccgtaaatcagctgcaagcgctttttcacattgttgatgcccacatggttctgcgcgtacagcgggctgtccggctcgttgatctccgcaatcacgtcctcggggaagccgccgccgttatccgtcaccgtcaggtcggcaaacgtgtccgcgccgctgcacagcaccgctgccttcacctcaattttcaaaacataatccggcgagtacacatgcttcacgcagttttccacaaagctctgcaaagaaagcggcgggatcggcaagtcccgtaaacgcgggtcaatgtcaaactggcacaccggcgggtactgcgaagacccccgctgcatctcgatgtaattttcaatgtggtctaattcgcgcgaaagcggcacaagctccatgctgtccgtaaaaatataccgtatgtgcttcgagatctccaaaatcattttttgaatgcggtcatatttacccgcttccgccaacgcatataagcttttaaggcaatttaagaagaaatgcgggcggatctgcagctgcatgtagcgcagctccgccttctgcgtctcaatctcgtgctcgtaagattcgattttcaaatccttaatctgcgtcatcatcgtgttgaacgtctcgttcacctcgttgaattcgcgtatgttcgtcttgccctcagccttcgcctccagattaccggcgcggatatgctccataacactgcgcagcccctccaccggcttcgagatggagttcgtcagctgccactgaatgaccggaatcagtaccagcgccagtaaagagagcaccagcagcgccgcctgcaagccatcgagtgagccgaaatacccgcttttgtttacggcaaggattgccctgcaatccgtacccgccaaatcgcggcccacgatcatataccgctgcttcccgcccgaaataaagtagttctcatagtcgccgttcagattgatcccgtttccctccacaaaatcgacagaggtcagcggctcgttgtttttgtcggaaaacaacatcaccgcgtcggtatcaatctgcatgtagcgcgcgtccgccagcgccgccaacggcaccatcgccacaagatacgtgccgcgcccgccgtaaaagcggaataaatacgccttgccgccgatctccgcgtgccgccactgcatattgtacgaatacgtgttattctccaccgcgtcgcgcacaaaagcgcgcagccgctccttctgcgcgtaggagatagaatcgtcaaaaatatcgcgctcggcatcgctcggcgcactgtaaatgaaaaacgcgcccacatcaccgtatgccggcagcgccgttttcaactgcgtaatgagcgtatagcttgcaagatacgcctttaagggggttttctcaccgcccgacagcgtgcggtaatcgtcgctcaccgtcaacccggtgagaaaatcgttcacagagtcgagctgctcctccatgcgccccgcccggtaatccatcgtgcgcatgttggaatccgcaattttcctgttaaatgcctgcgtggaatacaggttgctgaacaaaagcagcgcgatcagcggcagcgtgacgctcaatacagccgtcatcagttttcgcctgaacgagacttctttcttcacacttttcatgccgcgcgatcctttcatctattatagtatagaacgatgatacaatatcatagcagattttaaagcatttcgcaagttaaaatccgaaggaaccgtgtgattgaaataaacgtcctttcgtggtatactgaaactatatcaacggaaaagacgggaaacaggcacgtttcccgcagaaaggtcgttcagatgacggaacataacgccacttctctcagcgcaagccttgtgaaccgcaaggtctacaccgtgtgctacaccgggctcgatacgctgtcttcgtttcacgatgccctttatgaagcgcgccgcagctatttcggatccggcaaaaccgtacatatccgcgcccgcggcattttcgacggactttccggcgaggtgcacggcaagctctcccgccgcactataaaatggaaaaaacgcgcaggcaaaaatacgctcgaagccgcattcacagacggcggtcagcgcggcatcgcgttttataacgcctacggcgcattgcgcgcccgcgtgtactacgacggtgaaatgcagtggatgcgcacggagtatttctctcccgatgacgaccgccgcgcgcgcattacctttaagccggacgaccaccgcgacgccgtcatccgcttcgattataacgattccaccggcaaaacgaaagaaaccgtgctgttccccgtgccgtatgcgttccaaaccgccgagcagagtttgcaaaacgcccagttcggcgaccgccttctgctcgtcgccgatgagcgcggcgaatacgcctactgcccgcgtgaagagcagcagcgccgcatcaaatttctgaagcagaataaaaacgcctccgtcatgctctccatgggttgggaggtcaaggacggcgacgtgcctgaaacgaccgagccggagtctgaactgcccgttttcgtgaacctcaccgagcccgcacttgtcgatttcctgagcgaccccgccgaaaaagccgcagagcctaccgaagagaatcccgttctcgaagaagctacccccgaggaacccgaagccgagccgcagcccgaaacagaacccgagacgaaagaagtcgaagaatcccccattgaggacactcccgcagaagaacccgaagaagtcccggaagaacctgctcccgtagaaacgccaaaaacagactccgcccccgacatcacgccggaagagctccggcaggcacgtgccctgcttgataagctcctgcctgtaaaggaagctgaaaaagaggacgaccccaaagccggcatcacgctcatcagaggcggcacaccgctccgttacacaggcgacctttccgaagacggcaaacgcgagggcttcggccgcaccgtgaacaacaacggcatcacgctctatgaaggcgagtacaaaaacgacctgcgcgaggggttcggcgtgcaccactaccgcagcggcgctgtctcctacatcggcgacttcaaagaggatacgcgcgaaggcttcggcgtttcgttccgcgaaagcgaccacgcgctgcacatttcccactggcaaaacggtaagccgcaaggcatggcaacgattttcaacaaaaacggcgatttaatttacaacggccaaatcatcgacggccaaaagcagggcgcaggtgtctccgtcgaccccgaaacgcactgcgtgttcgtcgaaaaatatgaaaacaacaaaaaagcgggtcaagctaccctgttcgatgcagacggcaacttgatttattccggtggctggcagaacggtaaacggcagggtcacggcacggcgttcgacaaaaacggcaatgtcgtctacaccggcgagtggaaagatgaccgctatgaaaacggcattttgtaccgccacgtgcagaacgaggacaaagcgtaatggaccgcgttgaactgcacgacgtggaatacggcgactgcaccgtcctcgttgggcaaaaccggcagattttaatggtggattgcggctccgtcagccgctacgcccgccgcggtgaagaggagattgaccgccgttttaacgaaattttcagccgctatgcgcccgcctcccagcgccagtttctgctcacgcactaccaccgcgaccacatgagcggctttttaaagcaagtcaaaaaggatcccggctactttgaccgcgtatacctccccgccctcccgtgtgataagcgcggcgtaaatcccgttttggagttcgccgtgttcgcgcattttttcgccgttccgcaaagtgacttcgcgcaggtgaacaccacttgcctgcgtattttcgacgcgctcaatgattctgtcggcgcagaccgcattttcacgctcggcggcggcgacatcttcacatttgacggcgcgttttacgaggtgctctcccccgcgcgtaacgagcccttcccgttcgatgccatcctgacggaagccgtcgaaaacctcaacatctgcctctcttccccgtttcacaccgggcgcgaaacggagtttttggagacgaaggatgcgttcgttaggctctacatgcagtgtcaaacggccttcgcgccgtccgaccgcgccacgcccggcagacggcgcatcctgcttgattctctccgcgacctcttaggccgcatggaggatatgcgcagcaacctcgcccattcccccgccgcgccggatattcaggacattttaaatcaatccgtcgtgcgcaacgtctacaccgaaacgcagaacgacctctccctcgtctttcacaaccgccgaagccgcggcccgtcgaacctcgatattctaatgaccggcgacgtgtccgatgaagtgctgcgccgcatctccgggaagctgtttgacggctactatatcgtcaaagcgccgcaccacggcacagaaagccacttttcaaacgttatcggcgacctcgccgttgcgcacctgctcatctccaacggtgattaccacgcgggcggcgaaatttcccagcgctacatcgatatggagtgcatcaagcactgcacaaacgccggggcatgccgctggcgcgacatcgcgggcggatgctgcaaccggctgcaacggtgctacgagcagcccgcttccggctccctgacgctcaaatgcgccgcagccgccggcgagcgccgcacgtcatgcaatatctatgtattcggccacagcggcgttttgggctgccactgcgaccgcgggtagttacttcaacatgttctctacgccgtcaatgagctgccccaccgtgtgcacggccttggcggtgctgcggcgcatctcttttgtgcgcgccttggcggatttcttcccgccgttcatcatcgcggacgaaacggcagccacggcagcgcctgcggcaatgccgagacccacgcccttcacaacgttcatgctctgcttatacatggcatccaacctccagatccagattgcggcttttaaaacatacaaaacagccgtcacgtttagtttccccctttttacaaaaacatacatcattcttcccgaaaggactttgacagcaatgattttgaatatcgttatggtcgagccggagatcccccaaaacgccggcaacgtcgcgcgcacctgcgccgccacgggcgcaagactgcaccttgtgggccccatgggctttaagatcgacgacaaaaagctaaagcgcgccggtctcgattactggcatttgctcgacatcacctattatgactcgctcgacgaattttttgcaaaaaacagcggcgaatttttctttttctccacaaaatccgtccataagcacacggatatacactatcccgataattgctacctcttcttcggcaaagagacagccggactgccggaagatctgcttttcaaaaacaaagaccgctgcgtgcgcatccccatgatttcggaagcgcgcagcctaaacctctccaacagcatcgccatcggcgtttacgaagtcctgcgccagtgggattttcccgcgctctccgaagccggtcgcctgcgcggctacgactgggacgcggcagacgcgaacggtgcgaaataaaaacccgtacaaaatcgcaaaaatgaaaaatttgcgctaaaaagtgtgcaatttgcgcgttatctcttgaaatcatcttccgtttggtataaaataaattctgtaggcggtgttgtccgccaaccaaacgtataaccgtaactcaatatatttcttaaaggagtgtacgaaaatgaactacctcaacaagaaaaccgtagaagacatcgacgttgccggtaagcacgttcttgtccgctgcgatttcaacgtcccgatgaaggacggtgtcatcacggacacaaagcgcatcgtcggtgcgctgcccaccattaagtatctcgtagaccacaacgcaaaggtcatcctctgctcccacatgggtcgcccgcacaacatcttcaacgacgttgtaaagctcgacaagaaggagaagaagaagatcgacgctatgccggaggcagagcaggccgaagcgaccgctaaggcactcgaagctgctaagggcgacgtgaagaagttctccctggcgcctgtcgcagcagagctttccaagctcctcggcaaggaagtcatcatggcaaaagacgttgtaggtccggacgctaaggctaaggctgcagctctgaaggacggcgaagtcctcatgctcgagaatgttcgcttccacgcagaagagaccaagaacgacccggatttcgctaaggcactcgcttccatggctgagatctatgtcaacgatgcattcggcaccgcacaccgtgcacatgcttccacagcaggcgttgcagattacctcccggctgtctgcggctacctcatccagaaggaaatttccatcatgggcggcgcgctcgagaacccgaagcgtccgttcgttgcaatcctcggcggcgctaaggtttccgataagatcggcgtcatcaacaacctgattgaaaaggtcgacacgctcatcatcggcggcggcatggcttacaccttcttcaaggctctcggtcacgagatcggcacctctatctgcgaggacgacaaggttgagctcgctaaggaaatgatggacaaggcgaaggctaagggcatcaacttcctcatcccggtcgataacgttgttgcaaccgagtacagtgcagactccgagtggaagatcgtcgattccgacgacattccggaaggctggatgggtctggatatcggcccgaagagccgcgagctgttcgcaaacgccgtgaagaacgcaggcaccgttgtttggaacggcccgatgggcgtttccgagtgggaaaacttcgcaaacggcaccatcgcggttgcaaaggcagttgcagacagcaacgcgatctccattatcggcggcggcgactccgctgcggctgttgagaagctcggcttcgcggataagatgacgcacatctccacgggcggcggcgcttctctcgaattcctcgagggtcttgagctccccggcattgcttgcctcaacgagaaataattaaaagcatgaacgggagcggagcttgcctctgctcccgtattgttgtctcaataaaaacggtttttaaccgacggaaaggaatagaaaatcatgaacaaggctgttagaaaggctgttatcgccggcaactggaaaatgaacaaaacccctgcggaggcaaaggaactcatcaccgccattgctccgctcgttaaggacgcaggctgcgacgttgtcgcttgcgtgccgtatgtagacatcgcaaccgctattgaggcggctaagggcaccaacatcaagatcggcgcagagaactgccactgggcggtcagcggcgctttcaccggcgagatttccgcagaaatgctgaaggcttgcggcgttgagtacgtcatcaccggccacagcgagagaagaacctacttcggcgataccgacgttacggttcagaagagaacaagagctgcgcttgacgcaggcctcaccgtcatcgtttgcgtaggcgagtacctcgagcagcgcgagcagggcatcaccgatgagctcgttgccatgcagacaaagatcgcactcggcggcgtaaccgaagaagagcttaagcgcatcatcatcgcttacgagccggtttgggccatcggcaccggcaagaccgccacggcagagcaggcaaacgaagtttgcgctgtcattcgtgcgaccgtcaagtccctctacggcgaaaaggctgcagaaggcatcaccgttcagtacggcggctccatgaacgcaggcaacgcagctgagcttcttgcacagccggacgttgacggcggcctcatcggcggcgcttccctgaagccgaacgacttcgcagccatcgtagacgcagccaccaagggctgatttttccaccgaaagattttttccagttgaaaggaaaggcatctccactatgaaaagacctgttgtactcatgattctggacggtttcggaattgctaaaacggagggcaacgcgattgccgccgctaagagaccgaacctcgataagctgttctctgaaaacccgattacaaagatcggcgcttccggcatggacgtcggtctgccggacggccagatgggcaacagcgaagtcggccacaccaacatcggcgcaggccgcatcgtttatcaggagcttacccgcatcacgaaggcggtacaggacggttctttctttgagaacgaagcgctcgtacacgccatgaataacgcaaaagaaaacggcaccgcgctgcacctcatcggcctgctttccaacggcggcgtgcacagccacaaccagcacctctacggtctgctggaaatggcaaaaaagatgggcgttgaaaacgtctatgttcacgccctgctcgacggccgcgatgttccgccttcctccggcaaggacttcgtcaaggagctcatggagaagatgaaggaaatcggtgtcggcaaggtcgcaacggtcatgggccgttactatgcgatggaccgcgacaaccgctgggagcgcgtagaaaaggcttacaacgccatggtttgccgcgaaggcgaagagttcgcgtgcccggtttgcgctgtatcgaaatcctatgaaaatgaagtcacggacgagttcgtcgtgccgtgcgtcatcaagggcggcgctccggtcgcatccggcgattccgtcgtgttcttcaacttccgcccggaccgcgcaagagagatcacccgtacattcgtagacccggatttctccggcttcacccgcaagaatggcttcttcccgctcacctacgtctgcatgacgcagtatgacgccacgatgccgaacgttgagatcgcattcaagccgcagagccttaaaaacaccctcggcgagtacgtctccgataagggcctcaagcagctccgcattgccgaaaccgagaagtatgcgcatgtcacattcttcttcaacggcggcgtcgagaagcagtatccgggtgaggaccgcatcctcgtcaagtccccgaaggtcgcaacgtatgacctccagccggaaatgagcgcttacgaagtcacggataagatggttgaggccgtcaagtccggcaagtacgatatgatcattctgaactttgcaaactgcgacatggtcggccacaccggcgtgttcgaggctgcaaaggctgccgttgaggctgtcgatacctgcgtcggcaaggtcgcagcagccatcgacgagatgggcggcgtgctgctcatcaccgccgaccacggcaatgcagacaagatggttgatgatgacggtgaaccgtttaccgcacacaccacaaacccggttccgttctgcgttgtcggttatccgtgcaagctgcgtgagggcggcgttctcgcggacatcgcacccaccatgctgaagatcatggatctgccgcagccggaagaaatgacaggcaagagcatcattctctaattcgatcttgctctaaaatcaaagcattataaacagtctccctttgtgtttcggcacagagggagattttttgttctattttttttctaacaatttttaaatatatattgacaaaccctcctatacatgatatcatgcaagtgtaatatattaccaaaaaaacatatgcacaggtgatatttttcagcaaaaagttcaagctcaattcataacacaaattcatttgcaccgccgtatccgtcagcgtagccacaaatcctaacatcatcataggaggtcgttttatgaaaaagctcgcattggttttgtcccttgttttgatgctcacgtttgtcggctgttcgtctaagacaaccgtgaaagagacagacgctttccgattcgattccaagaccggctatgcgtattccactgcgccgttcggcatcgacacgacggagcttgaatccgctatcggctctaagctgacaatggtcagcgaaagccccgcgacagcgcctttcgcatatacgaattatttgtcggaggacatcgtgcagtccgcaggctgctccggcaaatttgatgcgcagtttgacgaaaacgacaagctgttttcggtgacgttccacgaacagcttgcgcgcggcacggcagaagagcattttgaagccgcaagcaaacgcttcaccgaaaccttcggcgcacctgccgttcaagacgacaacggtaccggcactcaatatctcgagtggcaggataaaagcagtggcacggcgctggggcttacatattccgatctcggcacgaccgatccgaccttgatgatctccgtctttgagaagtcccgctacgtcgaagccggaacaggcgagtggaaataaacttaaatatattagaagttgatctataaacaaaatctcccttggctttttgccatgggagatttttgccattttgcggataaattgatatctttaatagaagatattgaaaaatcagcaaagatgctctttgtcgcttaactgtgcttctttgctgctttagccgtattttttaccgaataaagttcgttgcgatgcgctgttccgtttccggcaggccaaatttttccttaccgagcgcaatgctcttcatcaaaaaagtcatatttctcgccaaggtgcgcatggtttgtagaccctccaaatcctctttcgcctcgcctagtgcgaggccgtgaatgctgttccaatactgactggacgcgacgggcatgccggagatcgtaaagaatttgttgagttcgtcgaacgtggcggaaaggccgccgcggcgggcagccacaacggcggcgccgactttcatcgttttatcgaacggagtgctgtaaaacaggcgcgtcaaaagcgcgacaagtgttgcgtttgcggaggcataatacaccggactgccgacgacaagaccgtccgcttccgcaaatttcgtcgcaacttcgttgacaagatcgttaaaaacgcagtgccccagcttagaacattgcccgcatgccacacatcctcggatgtctttgttgccgacatgaataacttccgtttcgataccttctttgttgaaaatatccaccatttcatgcagggcaacagcagtattgccgttcgccttcgggcttccgtttaagagtaagactttcattttccattttcctttctttgtgttttgttgttttctgtatacgcacgcagattactctgcgtttgatccgttaaatttttgaaaggcttatgcgcgtggcgggcgctttctttttcgttccaatcggcgatgacctcgcgcatgcgcttgttcgcttcatcgacctccaccttgaattcggaggccgtaacacgacgcgcgccgtgaccgagtacgatcatctgctctgcgccgtcggacgtggcgacgcgcacacggtgctttttgctgatctcaaacgtggcgcgctcaatgtaggtatctgccgtttccgcctgctttgtgaacacaacggaaatgttgtggtagcggataacgtcctccacgtcacgcgggacgcgataggcatcgaaaacgaggatgcacgtgctgcggctgaagctctgataattgcagattttatccattaaaatctgtcgagcggtgtcgatgtccttttcggcgaccttatttaaatcgtcccacgcaaagagaatattgtagccgtcgatgaggagatactcaggctcgaagaccttttccggcaccttccattccccttttccgctgctttctgcggcgcggacggcgttttgcggctgcatatcgcggcgtcggatagggccgtaggtgcgctcaaaaatggcgcgcagctcatcgtcgaacacaggcggcagctgtgcggcggcgcgcacgggagcttcggtttcggcagattttgttcccggcttttcgggcttccatccactttcgaggtgcatgtgggaagccgcctcgcgccacggcacaacgaagccggagccgtgcgaacagaagacggaatcgccggtgttctccaaatcatgctcggcatcgtagccgatatgctcgatgacctcttcggcattatggcacggcaagtagcccttcggcatacaaataaggctgccaagcccgcgcgtgtacgatgcgacctccaaggtgtaaccctgcatttcggagacgggcgcaaagcccgtgatgacggcattttcaccctcggtctgcggcggctcgaactccgcgcaaaggcgctgcatgtccgaaatggcgcggccgacctgcgactgcggaacctctaatcggaaatcgtaccacggctctaaaagcacgcttttcgcctgtaataagccgtggcgcacggcgcgataggtggcctgacgaaaatcgccgccctcggtgtgctttaaatgcgcacggccgatgagaagcgtgattttcatatccgtgatgggcgagccggtcagcacgccggggtagctgcgctcctcaaggtgcgttaaaatgagattctgccagttgcggtcaagcacatccatgctgcacacggtgccgaaacgcataccgctgccgcgctcgccgggcgctaagagcaggtgcacctcggcgtaatggcgcaggggctcaaaatgccccatgccttcgacgggttcttcgatcgtctcgcggtagacaatgctgccggtaccgaacgtgacctccattttaaagcgctcttttaagacgcgctgcaaaacttcaagctgcaccgcgcccataatctgcacgtgaatttcgtgtaattgctcgttccacacgacatgaagctgggggtcttcttcctccaaaacgcgcaaacagcgcacggcggtgtgcggctccatgccgtccggcaagaagacctgatacgtcaaaaagctttcaagcacgggcgcgggggtgtcttcctccgcaccgagtccctgcccgggatacgtgtgcgtgaggcccgttacggtgcacacgccacccgcggtgacttcctccgcaaggcgaaatttcccaccggaatagatgcggagctggtcggctttttctgcccatacgttttcgcccgcgccgcctttaaggaccattttaacgggcaaagcgccgcctgtgatcttcaaatacgtaagccgtgcgccctgattatcgtgtgcgattttgaagacctttgcgccgaaagccttagggtattcgggcatttcggtgtacatttcaagaccgtttaaaagttcttttacgccgtctaacttcaaagccgagccgaaccagcacggaaaaagcttgcgatttttgatgaggcgtttaatctcgggacattcgacttcgcccgtttcgaggtaatgggcgagcgtgtcttcgtcacaaacggcgatgttttcatcgcgttccgcttcgggagatgtgaaatcgacgcaaccggtgctgagcttttgcagttcggctaagactttatcgtggtctgcgccgtcgagatccattttgttgatgaaaaggaacgtggggacgttatagcgctccaaaagccgccacagcgtacgcgtgtggctctgcacaccgtctgtgccgctgatgacgagcacagcgtaatcgagtacctgaagcgtacgctccatttcgctggaaaaatcgacgtgaccgggggtatcgagcagcgtaaacgcggtatgttcgagcggtaaaacggcctgctttgagaaaatggtgatgccgcgctcgcgctcctgcacgtcggtatcgagaaacgcgtcctgatgatcgacgcgcccaagacggcggagctgcccgccttcatacagcatcgcttccgaaagtgtggtcttgccggcatcgacatgcgccaaaagcccaaggcatatttggtttttcgttgtgtttcgcttctgctcgctcatgaaaagtgtctccctgtaccgccgttaaaattaaacttcgatttaataaacagtataccactttttgaagatactgacaatatctcgcgcggaagagagtcgaaattaggcggcgcaaaccaagatttgctattgaaaaaaaccgcgttttttgctatactaaaaacagatttttcgcgggcagataccgaacgcccgcttttttactgtattcggggtgtatcggaaaacaagtttacggcttttcaaatgcaccctaaaggggattattttaggacgcatgagacgtatgaattaaggaaggggaatgaccatgaagaaaatcggttttgacagtcagaagtatatcgagctgcagtctgcacgtattcgcgagcgcattgaccagttcggcggcaagctgtatctggaattcggcggcaagctgtttgacgatttccacgcttcacgcgtgctgccgggctttgagccggacaacaagatcaagatgcttttggcgctgaaagaccaggcggagattgtcattgcgatcaacgcgaacgacattgagaaaaacaagcgccgcagcgaccttggcattacgtatgacacggacgtcatccgtttgattgatattttccgcggcttcggcttatatgtgggcagcatcacgctgacgcagtacgcagaccagccctccgcggcgatttttgagcagcgcatgaagacactggggctgaaggtctaccgccagtaccgcattccggggtacccctctgacgtgaagctcattgtaagcgacgagggctacggccgcaacgactacattgagacgacgcgctcccttgttgtggtgacggcgccgggcccgggcagcggcaaaatggcaacctgcctttcgcagctttaccatgagcacaagcgcggcattaaggcgggctacgcgaagtttgagaccttccccatttggaacctccccttaaagcacccggtgaaccttgcctatgaagcggcgacggctgacctgaatgatatgaacatgatcgacccgttccaccttgaggcgtacggtgagacgactgtaaactacaaccgcgacattgaaatctaccccgtgctgcgtgcgatgtttgagcagatttacggcgagtgcccgtacgcgagcccgacggacatgggcgtgaacatggcgggtctgtccatcatcgacgatgaagtgtgccgtgaagcctcgaagcaggagattattcgccgctactttaagacggcgtgccttgtgcgccaaggtcttgcttccgaagcggaattacagaaaatcgagaacctgatgcgccagctgaagttggagccggagaaccgcccggtcgtgctcgcagcattgaagcgcgcggaagcgacaggacagcccgcggcagctttagagctgccggacggcacgattgtgacggggcgcacatcggaattgctgggtgcttcctctgcgttgacactgaacgctttgaagatgcttgcaggcattccgcacgaggtgaagctcatctcgccgacggtcattgcgcctattcagacgctgaaaaccgactacatgcagagccgaaacccgcgcttgcacaccgatgagatgttggtggcgctcgccatcagcgcggcgaccgacgaaaacgcgatgcgcgccatgcagaagctggacgagctgagcggctgtgatttgcactccagcgtaatcctcggcacggtagacgacagcgtattcaaacgccttggcatcaacgtgacgtgcgaagcaacgtatgaggacaataacctctaccacaaataatctttcttgtaatataaaaccgctcgaagccgtaaagcccgagcggtttttgttataggaattttcggatttaaattgtaaaatagcggccggtaatgatcttttgcacaagattcgaaattttgcggctatccgtaaaatcatccttgcgaatagcgtaaaccaccatgctgatgatcgcgccggcaagaaatgaaatggcgtaatcacggtcttcgtggtcataagcgtggaaaatattgtccaaatgcaggagatacgcttccgatttttcgcgagccaatgtatccagatgattttcgaccagaagactgaggagttttttctgctccacaaaacactccataatagaatcacatagactgcgaatggtgtaagcgcgcttttccgcaatgaatcgtttgcggtattcttcaaaaagccggtcgagccgacgcccaatgacctcttccttattttcaaacagcgagtaaaacgtctggcgtgaaacgccggcgtgggcacaaacggcttttatcgtgattttttgaaacggctcttcctccataagtgctaaaagtgcctctgtgatgaggttctgcgattgcagcgccgttggattttttccctgatacatagacattccctcctgtttcgtcaatattttcactcaacttggacaaatgtcaaattgacaagtgtcaatggttcatattataatgactttataagaggttgtcaagacgagactctcggcaaaattgtgaattttttgtggcgcgaaatttttggggagtgtgtgaaaaacatggaagtgcgcgacgctttatatattattttcgggtatctcctgggcagtattttgtttgcgcggctcggtgggctgatctttaaaaagacagacattatggcggaaagcccggacaagaacccgggcacaatgaatgcgtttacatacggtgggttccggtgcggcgtgtttacgctgtgcggcgacctgttcaagggctttttgccggtttttttgtaccgcagcggagaactgcccgaaaacccgctgatgctctcttttgtgatggcggcgccggtcttgggccatattctgccgttttatgacattaaacacggcggcaaaggcattgcggcaacgtttgggtgctttttggggctgctgccgcactggatccctctgtgcgttttggcgagcatcttcattttcttttcgtgcgttgttaaaatcaacccgaactattaccgcacagtggcgacgtatatcctggcggccatttgcacggtttggctggagccaaaccgctatatcgtcttcggctttttgctgattgcggcttcggtgctcgcaaagctctttatgagtgccgaggaaaaagaacactttgaggtgaaacttgcatggaagcactgattttatcctgcagcacgggcggcgggcacaacacggcggcacaagcggtttttgaggcgctgacggaacgcgggcaccacgccgtgcgcatggacccgtacacgctggtgagcgaggagcttgcaaataaagtcgggcagacctatataaagttggtacagaaaagcccgaagctgtttggcgcggtctatgacctcggtaacgcgtaccgtaagctgccggggcgctcgccggtgtaccacatcaacggcaaaatggcgccgtacatgcagaaataccttgcgaaacacctaacggacgtgatcgtctgcacgcatttgtacccggcggagattttgacgcacatgcggctaaacggcatggaaacgccgccgtttgtgtttattgcgacggactacacttgcgttccgtttacggaggaatcggactgcgacttgtacgtgacgccctccccgcttttgagcagcgatttcaccgggcgaggcattcctgcggaaaaattgcggccgctgggcatcccggtgcggctggatttttccgatgataccatcacgaaagacagagcgcgggaagcgcttaacttgccgaaagacaggcgcacgttgctgctttccggcgggagcatgggcgcgggggcaattattaatgccgtgcgggcactgctgccgtatttgaagcaaaatgcaaactgcgacctcaacattttgtgcggcagcaatgaggcgctgtttgacagcgtggaaactgaatttgcagaaaatgggcaaatcacgccgatgcacagcacgaacaaaatggcactgtatttaaaggcaagcaacgtatttatctcgaagccgggcggactttcatctacggagagcgccgcggcgggcgtgccgcttgtgcacatttcgccgatacccgggtgcgaaagccgcaacgcggagttttttgccaaggagggtatcgccgtaaaggtggaaaacacagaaacagagcttttgtcggcggtggaaaggctttcggagccgggaaatgcagaagaaatgcgcaaacggcagagagcagttatcaatcaaaatgcagccatagatatttgcgagctgttggaaacggtagcacagtgatgacgcaaaatgtgggttaaaagtttttgatcgaccttttttcaaaaaaggtcgcggattcttagggctgagccctaagccgaactccgcagagttcggaatacttttgcctaactcaaaactaggaaggtagatttgaacgtccgggggacgttcaaattgtagggaacccagttgcatgggttccctgaaagagcggctttgcgccgctttttttatatacacagtttttttctaagtgaaaggtaccgtgaagttcattagcacgctgtatcacttcctttccctctgtcagagggagccgacataaaaagagccactgtgattactcgcagtggctcttaaacaccttaaatttaaatttagaaacgatcgcgcttgacgtaagacgtatgcagcagctcgtgtgccttatggcagccgggctcgccgcccatccattcgtagcactccttgacgacggggttcaggtggctctttctgagcgtcttggccgcgtcctcatcgtagagggcttttgcacgcagggccttaatgtccgtgaagctgcgaaccgtagacggctgaatcggctggccgccgccgtttacgcaaccgcccgggcagcacatgacttccacgatgtggtagtcggcttcgccgctttcaatcttcttgagcagctcgtttgcgttattcagaccgctgacgacagcgaccttgacatccataccggcaaccttgtaaacagcttccttgaagcccttcgtaccgcgaatctctttgtactcgatgttatcgtggtcgacgccctcaagcacatcggctgcggtacggagcgctgcttccagaacgccgcccgtcgcgccgaagatcgtagctgcgccggtggaaacgcccataaccgggtcaaaatcctcttccggcagtcttgcaaagttgagctgtgccatcttaatcatgcgggcaagctcgcgggtggtaatggagatatcaacgtccggcacaccggctgcgtcttcgtcgtcacggttgatctcgaatttcttcgcgacgcacggcatgacggaaacagaaacgatgttgttcggatcgatgccttctctttccgcaaaccacgttttgatgagcgcaccagtcatctgctgcggggacttgcaggtggagaggttttctgtgaggctcgggaagtagtgctcgcagaacttgacccagcccggagagcaggaggtgatgatcggcagcttgccgccgttcttcacgcggtcaatgaactcgtttgcttcttccatgatggtcatatcggcaccgaaatcggtatcgtagaccttatcgaagccaaggcggcgcagggctgcgaccatcttgccttctacgttcgtgccgatcggcataccgaactcttcgccgagcgctgcgcgcacagccggagccgtctgcacgacaacgaccttttccggatcgttgatggcatcgatgacctgctgggtattgtccttttcggtgagggcacctgtcgggcaggctacgatacactggccgcaggaaacgcaggccacttcgctgagcggcatctcaaatgcgcagccgatctcggtatcgaaaccgcggttgttcgcgccgatgacggcgacgtgctgctgctggcaggctgccacgcagcggcggcacaggatgcactttgcattatctctttcgaggtacagggtgctgtaatcctttttgccggcgggaacggcgccttcgtagcggttctcgctgtcgatacccatatcgttgcagagcttctgcagctcgcaggtgccgcttctcttgcaggagagacatttgcggtcatgcacggagagcaagagctccagtgtcatttttctggatttctgaaccttcggcgtattggtgaagacctccatgccctcgtttaccgggtacacgcaggcggcaacaagcgattttgcgcccttaacttcgaccatgcacatacggcatgcgccgatctggttgacgtccttcaagaagcaaagggtgggaatgtcgattccggcttctcttgcggcttcgaggatcgtgctgccggcagcgacctcgtaggacatgccgttgatcttaatatttaccatatccatgctattctcaacttccttccttacttcttttcgatggcgccgaacttgcacttttcacggcagacgccgcacttgatgcacttctgcgtatcgatgacatgcggctcgcggacggtgccggagatagcgccgaccgggcagttgcgtgcgcagagcgtgcagcccttgcacttgtccgcatcgatgacgtaattcgtgagggccttgcaggcgcctgccgggcaacgatgctcggtgacgtgcgcaatgtactcatcacggtaatacttgagtgtggaaagaaccgggttcggcgctgtctggccgagaccgcagagggagttttccttaatgtagtagcagagctcttcgagcttatcgatgtcttcgagcgttcccttgccgcttgtaatcttgttgaggatctcaagcaggcgcttcgtgccgacacggcacggggtgcacttgccgcaggattcatcgaccgtgaactcaaggaagaactttgcaatatcgaccatgcaggtcgtttcatccataacgatgaggccgccggagcccatcatggagccgatggcgatgaggctgtcgtaatcgataggtgtatcgatgagggacgccgggatgcagccgccggaagggccgccggtctgtgcagctttgaacttgtggccgcccgggatgccgccgccgatttcttcaacaacttcacgcagggtggtacccatcggaacctcaacaaggccggtattgttaatcttaccgccgagtgcgaacactttggtacctgcgctcttctctgtgccaatgctgcggaaccactgcggtcccttgaggaagatttgcgggatgttggcatacgtctcaacgttattcagaacggtcggcttctggaacagacctctgagtgccgggaacggcgggcggcatctcggctcgccgcgcttgccttcgatggaggtcatgagcgcggtctcttcgccgcacacgaatgcgccggcgccgaggcggatctcaaggtcgaaatcaaagccggaatcgaagatatttttgccaagcaggccatactctctcgcctggttgatggcaatctggagacggtgaaccgcgatggggtactctgcacggatgtagatgtagccctgcgttgcgccgatggcgtaaccggcgatagtcatggcttcgatgacgctgtgcgggtcgccttccagaatggaacggtccatgaatgcgcccgggtcgccctcgtcggcgttacaacatacatatttctgatcggcatcgtttgccgctgcgaatttccacttaagaccggtggggaagcctgcaccgccacgaccgcggaggccggaatcgagcatggtctgaatgacctgctggggcgggatcttctccgtgagaatcttgccgattgcctgatagccgtcgagcgcgatgtactcatcgatctgctccgggttgatcacgccgcagttgcgcagtgcgacacgcatctgctttgcgtagaacgtggtctcgttaagggattttgtagtgttttcgtcaacgaccgtctccttgtagagcaggcggcgaacgatacgtcccttgagcaggtgctcttcaacaatttccgggacatcttccggggtgacgcggctatagaacgcgccctccgggtatacgatcatgatcgggccgagtgcgcacagaccgaagcagccggtacgaacaacgttgacttcctgatccagacctttggcgctgatttcctccttcagcttttcaatgatcttttcgctgttcgaggacgtgcagcccgtaccgccgcagaccagaacattggaacgaaacatagttttacctccttatttctgatttgcaccgatggtgtattccgtgacgacattgccgttgacgatgtgatcgttgacaacgcgcagtgccttttccggtgtcatttttacgtatgtagtcttggtgccgttttcatcgataacttcgacgatcggctcgaactggcagatgccgatgcagcctgtctgcgtgaccaggacgtcgtgaagctcgcgtttgttgacctcatccgagatggcggtgagaaccggtcttgcgcctgctgcgataccgcaggtagccatgccgaccagaacacgcgttttcgcttcggaattttcgcggacgttgaccgccatttttgctctatctcgaattgcctgaagttcagctaatgatttcatgtggcttttcctttctgcgccttgcgcattgatactacgagagctgcttaagctcttcctccgcctctgcaagatactcccgaatccacgccgatacctcgggctccgtaaacggaacgccctccagctgctcgcgcagcgtacgggtatcgagggtgatctctttttcttcaacgctgtgagtaaagagaaaatcgagttcgggattgcaggtgatcaaaagatggataacggacgcgatgtccccgagggggatcatatcgacatgcgagggacgaaacacagccgtgactttggtgcccttgcccttttcggaatcaatctgaaacgagccgcccgtcatttccgcttccattttgaaaagcggcacgccaagcccaaccttgcgggtagtgcgtgtggtgaaaaacgggtcgatgacgcttttgacctgctccgcactcatgccgcagccgttatccgttatcgtgatggttaaggtgtcgtgctttttcgattccgcgacctgcaccgtgataagcgatgcgcccgcgcgaacggagttctgcacaatgtccatcacattcaacgaaagctcgcgcatggcttacgctgtgtattttgcaagaatcttatccacgtcctcgggaacgagacggccgtaaacgtcttcgttgacggtgaggaccggcgcaaggccgcaggcgccgatgcagcgacatgcggtgagtgagaacacgccatccggcgtacattcctccggctggatgccgagctttgcaacgagacggtcgagaaccttatctgcgcccttaacgtagcatgcggtgccgaggcaaatggaaatgttgtacttacccttcggagtgagcgagaactgagaatagaacgtggaaacgccgtagacctcttcgagagatacatcgagaccgcgtgcaatctccttctgcacttcgatcggcaggtagccgtagatatcctgcgccttgtgcagtgcagccatgacggcgcctttttcattcttgaggctctcgatgactgcgaggagcttctcatgctgctcgggagtatcggtaaacggaatggtactgatacgcttttgcattttatttcctccctgataaaattaagtttaaattcaggtatggttcggtctgcgcccctattgggcgaagagctttcatacatctttatgaattatatcaaaatcgacatacataataattctaaaaaagaattaaaaacgaaagtttgtcaaacccatgacgaaatttttgtcagttcttttagcgtacagcacaaaaatttcgttttcaggcatttgttaaagtatacaaaaacagtatagatttgccgtgaaaaggttgaaatatcactcattttatcgatattttatatcgataaaagtatatctattccgtttttaccagatttgcaaaagttagaaacagctaattttcaaaagagcgagattaacgaaattttatgcaatttaacgaaaatccggcgatttagccatgttggtaaaaatgacgaaagctgtgcgttatgcgaaattcgcatagcacacagcttggcgtttttttcttataaagcctgaaatttacctgcaccgaacccacgcagcacatctaaaagcgctttggcggttttttccggcagctccaccgtttggtgttcttcgggcatcaaatgcaggtaatgcgcgtcagagctgcgcagaagcaccatgctttcgagctccgggtgcagaagccgctgctgtgcggcatcggcagtaagggacagctctgctgcggaaaactgcgcttccggcgggatagcaccgagcgacgcagtgacgctgtacgcgtctttatcgacatgcgcgggaaacgccacgccgttaaactctttcacgagcgcctgcacgtcgttgatgctgatgtctgttgcggtaatgagaagctcggaaatttctccgatcttctcgtcgttttcgtttaagacccactgctcgccgaaaatttccgggcggttcggcacctttggaacgtgcgcacagacgtatttatcgaacgcgagcgcgtcctcgaccgtttcaaacagacagacgacgtgtgcttcttcggcggtgcagagttccataccgggaatgacgagcacgcccgcggcctgccccacctttacggcagcgggcgtattgcgacaggtattgtgatccgtaagcgcgatgatgtcgcagccgagcagcgccgccatgttgacgaggttgttcggcgtcatgtccgtatcgccgcacggagaaaggcacgagtgcaggtgcaggtcgtaccgatagctgttcatacattcaccccagtaatgaagcgattttgagcgcggtttcaaaggcaggcagggatgtaccgtacacggcgatttcctgctgctcggcacgcgctttggcatctgcatccaaagcggcatcttccacaaggatgatgcctgcggtatcggcaagcgatgcgaccgcgatggcgttgacgttgcccataacagtaagccacgcgtcgtccgctttggctctgcccatgacccagcttaaaagatcgccgcagtagcagcccttcacttcgcgcgttgtatctgtattttcggtcaaaagcttccagccgagtgcttcggccatttcctctatctgcattttacttccccctattcgtcatcatttgtgcgtttgccgccgtcaaggtctaaatttgagagcgaatccgcaaaacggcggatctccttgcgcaggatgaacacgcagtcttccttgcggcagcttccgcgcacggtgtcctccgcaaaggcacggcagctcggtgcaccgcacgcgccgcaatcgagccccggcagctccgcttccaccttgtcgatctccatcatcatttccatggcgcgggaaatatcctccgaaagcgttaaaacattggaaaactccagcccgctgccccagttcatttcctccgggacggttttgtttttctccaagtgattctgcgagacgggcagatatttgcgcaatctttgcaatcttgcaatggcgacatacgggttttcgacgcacagcacgccgccgacgcagccgccggagcaggcgttgagctcgatgaaatccagctcaccgatgcgttcgtcttcaatctcctccaaaacgcggatgacgttttcgatgccgtccgccgcgagatatttttcttttaacagcgccgaggattcgccgccggaggtcgcccagctgacaccgataatgccggaatttgagagcgattcgagatcttttggcgtgagcttatccatgcggcttgaaagctgcgggaaaatttcgctgatggcgatggcgccgtctacctccgacttttcgatgccgatgggcatgcgaatatccgtaacctttgcgggacacggcgtgatgaaaaagcagccgatctgctctttcggcaggcccgttttctgcatggcctgctgctttgcaatccttgccgcagtctccatgggcgacaaaagcggcagaacgtggtcgcagagatccgggaagcggacgcggattaaacgcacgacagccgggcaagccgagctgatgacggggcgctgcaaggtgccggcatccatcaggcggcgggtagcctcgctgacaagctctgccgcgccggaaacctccatgacgtcatcgaacccaagctttttaaggccggataaaacataatcctgatcgtccaaattattaaactgcccataaagagacggtgcgggcagcgcgattttatatgtaaacttttccagcatggaaaggtggtcatgctttgcacgctttgcgtggtgcgggcagatgcggatgcactctccgcaatcgatacagcgctcgctcatgatgaccgctttgccgctgcgcacgcgaatggcttccgttgggcaacgcttgatgcagtttgtgcagcctacgcacttgctttcatcgagcgtgaccgagtggaaaaaaatacccaatctaacgcgcctcctccattatcctatgcagagcttacgatttttcgctctgcgcgtaaacgaccattttgagcgtggtgccctgccccacgaccgaatcaatcgtcatttcgtcggaatacttcttcatgttcggcaggcccatgccggcgccaaaaccaagcgaccgcacgttatccggcgcggtggaccagccctcctgcatggccttttccacgtctgcgatgccgggaccgtggtcggtgagcacgatgacaaccttatccgggtccacgtccacattggcttcgccgccgcccgcatggataaccatgttgatttcaccctcgtacatggcgatggaaacgcggcgaatggcagatgggttatagccgagtttctttaatttatgctttacatcgcccgaagcttcgcctgcgcgggtaaaatcatcgccggggactgaataccgaagttgcagcatactcatgatacgtcacacccgccttctaatcctttttcgtataggaggccgcacgccgtgaacattctgtacggcgttgcgagaatggtgatgtccttttgccgtgcgagcgacaacacggtctcatccgggcgcttgccgcgcacaaagatgatgcagtgcatatccatcatttccgccgtgcgtaccacctgcggattgacaaggcccgtgagcagcacggactgatccttgacaaacgccagcacatcgctcatcatatcgctgccgcatgcggttttgacctcttcctgaaggtcgccctccgccagtatttccgcctttaaaatgttgacaatattctgtaccttcatgaaagcttcaccctttcgccgagttcggacacgggtctgtttgctctttttgagcctaaagtgtccttgtattctgttattatacaaaaagatttccaaaaaatcaatccgttatggaaaatgttctgtacttttagatagtttttaaagtgtttttttgccgcgttttttgccttgcggtcgaaaaatgcagatttgtcaacagaaggtggacaatttatttgtatttgtgcatggggcacgaacgaaatgcagcattcgatatttgtccaccgattagatacacctgtttttattccgaaaacaaatttatacttgacatttgcgttttgctgtatgtataataggggaaactttaccgcagtgctataagaaatcacggtaaagcaaggcaaatctattttattatccggtgcgatttaacgcgccaaagaaaggaagatcttactatgaaccgtgtgtacaacttctctgccggcccctctatgctgccggaaagcgttcttctgagagccgctgccgaaatgctcgactatgaaggatcaggccagtccgtgatggagatgtcacaccgatctaaggtctatgacgcgatcatcaaaggcgcggaaagccttctgcgcgaggtgatggaaatcccggataactacaaggtgctctttttgcagggcggcgcatcctcgcagtttgcgatggtgccgctgaatttgatgacgaaaaaccgcaaggccgactatgtactctccggccagttctccacaaaagcgtataaggaagccgcgcgatttggcgattgcaaagtggtggcatcctcgaaagagcagaatttcagccgcattcccgaccttgacccgaaggagttccgcccggacgcggattacttccatatctgcatgaacaacacgatctacggcacggtattccatgcgctgccggagacgggtgacgtgccgcttgtggcagacatttcctcctgcattttaagccgcccgatcgatgtttcgagattcggcgttttgtatgcgggcgcgcaaaaaaatgtagccccggcaggcctgaccattgtcatcatccgcgaggatctcatcggcgagccgcaggaaaaaacgccgacgatgttcatgtataagacgcacgcggaaagcgacagcatgtacaacacgccgccgtgttactccatttacatgtgcaagctcgttttggaatggctgaaaaacgaagtaggcgggctgaaggcgatggaaaagcgcaacgtggaaaaggccgcgctgctctatgatttcctcgaccgctcaaaactttttaagggctgcgccgaaaaagaaagccgttccattatgaacgtgacattcgtgacgggcgacaaggatttagacgcaaaattcgtgcaggaagctgccgctgcgggctttgtgaatctgaagggccaccgcagcgtgggcggcatgcgcgcgtctatctataacgcgatgccgcgcgagggcgtggagaagcttgttcagtttatggagaactttgaaaaggagaatgcctgatgcacaacatactttgcctcaataagatcagcccgctcggcaccgaccgtttgggcgaaaactatacatacgctgccgaaattgagaacccggagggcattttagtgcgctccgccgccatgcacgacatggaattacccaatagcctgcttgcaatcgcgagggcaggcgcgggcgtgaacaacattcccgtggaaaagtgcgcggaagccggcattgtggtattcaacacacccggcgcaaacgccaacgccgtgaaggagctggtgctggcggcactgctgttgacgtcgagaaaaattgtcccggcgattgaatgggcgcagacactaaaaggcacggcagacatttcgaagcaggtggaaaaaggaaaatccgcgtttgcagggccggaaattctcggcaaaaagctgggcgtgattggtcttggcgcgatcggcgtgctcgttgcgaacgccgcacagacgctcggcatgcaggtatacggcttcgacccgttcctttccgtggacgctgcatggaacctttcgagcgacattgtgaaggccgcttccgtggatgagatttttgaaaagtgcgattacattacaatacatgtaccgctgaatgactcgacgcgcggactcataggcgcggacgctttgaaaaaagtgaaaaaaggtgtgcgcgtcttaaacttctcgcgcggggcgctcgtcgataccgacgcgatgttggcggcgcttgcagacggcaccgttgccgcgtatgcgacggacttcccggatgacgcgctgttcggggtcgaaaacgtcatcgcgatcccgcaccttggcgcttccacgccggaaagcgaggataactgcgctgtgatggccgcagaggagctgaaggattacattgaaaacggcaacatccgaaatgccgtcaacttcccgtatatttccatggcgcgcggcgcggacacacgcatttgccttgcgcacagaaacattccaaataccatcggttcgttcacacaggtgtgcggtgaagcgggcatcaacattgagaacatgctctcgaaatcgcgtggcgactgggcatacaccattttggacgttacgggcgacgtgacggaggacgtgcgcgaaaagctggcggcactttcgccggttgtaagggcaagagtaataaagtaagctcttacttcaccattcgcgggcaggagaccgaaaaaagatagaggatatcgtgacaaggcacgaaccggtcgttttaagccgagccaaaagcgcgacctttatttctgtgattttgcaaaacaacaaaaacacggtgcagcttcatttcggctgcaccgtgttttttgagtttacggataatgctgttcagtcttgctcctgcacggcgctgcccaacaagagggcggcgatacactgcacgatttctttgtcgctggcatcttcggggatggcactccaaaacgcgcgggctgcggcatttgaagaatttttcgccgtgcgaagggctttgccaatctcctcgcggaccgtttcaccgtctacgccgtgtttggctgctacgcgcagcatcaattcctgttcactcaaaatctctcatccttcctgatccggcccggcagccccgctgtacttttagagcggaggctgtcggatgggtggtaaatctgtcagtaatgccattatagcaagggggtcttgaaagttcaaatagaatcgttcgcgcgttttcgacggaaattgacaggttccttttcaccctgacaaaaggtgtgcggttttttgcgaaaaagccgaaattgttacgaaaagttcatattttgacgcacagtaaagcgagagaaaatcgggaaaatcaggtatcggaggtgttgcccggcatctgcggaggcgtgccgccgttaccgttcggcggggttatgccactatcgccgctcggcatttccggcggggtggtgccatcactgttgccgttcggcatttggccgcccataccgccgtttggagcctgaccacccatattaccggggccgccgccaaagttgcccatacccgtagcgccgctgacaacgccggagcaggtctcgctcgcggcttctgtaccgtttacatagactgtatacgtttcgccctcggtgatgtccggcgtgctgaacgtgacattcgtaaagctcttcggagccacggcggaaacgagcgtgttgccgtccgcgcccttcacttctacggtgtcacccgcgctgccggtgcagctgacgctgatcgtgttctgtttggaatccgttgtgggggtcttcagcatgccggagctgcctgtgccgagcacaacgccgccgttgatggtaaacacgccgtcgcagtcaaatgtgccgttaccgtcaccggtggggccgctgacgtacaccgtaccgccgttaatcgtaagcgcaccgttggaatcgagcccgtcgccggaggcgtttacggtgagcgtgccgccgttgacggtgatcgtatctgcacccgcggtgccaaagccgccgtcaacggagctgcctgcagcattcagaccgtcgtcgcttgcggtgacatcgatcgtaccgccgttgatggtgaggtcgatggcttcaaggccctcgcaggactcttccaccacgatggtgccgtcctcgattgtaagggtgttatctgcgtgcaggccgtcgtcgccggactttacggtgataccgccgcctgaaacggtcatcgaatcgttgctgtgcaggctgtcgtctgcggaatcgaccgtgacggtgccgccggtgatgtcgagcgcggcttcggccttgatgccctttgtagacagggtttcgtccgccgttgtattctgtgcgccgccaaacatagcattgcccgttttttgctctccattcgcgctgccgccgcctgcggtgacatttacttcgcccgcggaaatgagaacaccggtctccgcctgaatgccgtcctgctcggcggtgatgttcacagtgcccccgccgatatagacatagcctttatcggcctcggatttggtggacttgatgccgttgccggaagccgtgatatggacggtgccgtccttaatgagcacagcgtctttgccgatgaggccgtcgtccgccgaagtgatattcaaaacgccgccggtgattttcaatttatcttcgctcgtgatgccgtcatttgcattggagttgacgttcagcacgcccgtgccgttaacggaaaggtcgcatttggcgaaaaccgcggcggtaagctcatcgtcgccgtccgtaccggtgatagtatcggtcacggtgctttcggtgttttcgggcaggctgataatgactttatcggcgtttttcgcgtagataggcgcagtcgttgtgcaggtgatgctcgcgttttcgagcacaaggcgcacatcatcctcgtcgccggcatcaatgatgacctggccgtccgtgagcgtgccgctgagaacatacatgcccgcttccgtaatggtgaccgtgctgccggaaaccttaacgccgtctgcttcctttggcgcggaaaggtcgatcttcacggtgtcttccgtactgtaatcgatgtagaaatccttatttttgaaggaaagatttgcttcgatgacggagccgatggtaccgttcatcgcgccgccggtagaatcggtctcgtctgcaccgctttcctcagaggtgctggccgtgctcacggtagaggaagcggaagatacggacgtagacgatgtggtcgactgtgtggaggcacaacccgctaagatcagtgcggagagaatgacagcaaagcgcagggtgtgttttttcgtggataaacgattcggtttcataaaggaaggctcctttctttacagttgttccacgggagtatgcggctggccgcagcgtacttcgagattgccgttgcggcagcgaagcgcatcgagaaattctttttcgttacggtcgtccgcaaggcgcacgcgatagtgcagcttatagaggctaccgaggcttgcggtcttgacttccgtaagctctgcgtgggtggtgtattctttgaaaatatcgtcgaacacctcggtgtaatcgagcgattcagggatggtgatgctaagctctttttcgccgctgcggtctgcaccgatatggaagaaaacgagcagatacagcacggcgcacgcaatgaccgtgaagagcacggagagcgcaatatagccgctgccgcaggcgagacccacggccatggcaacgaagatgacggagatgtctttggcgttaccgggtgcggagcggaaacggacaaggccgaacgcgccggcgaccgcaacgcccgtgccgacgttgccgttgacgagcataatgacggtctgcacggcaaacggcagtaaaatgacggcgagcacaaggctttgcgtaaagcgcgtgcggcgcgtatacgtaaacgcgatgagcgcgccgcaaagcagcgcaacgagagagcaaatcaaaaacgaagatacggtgataccggacgaggtgaggcttgcaaacatggtttccatgggaatatcctttctgaaatcaaatgaattatttaggatgcatgcacgatgtgcgtgccgtgggtgttataggcactggcatatttagaaaacgacgcggggtaaattctaaagcggctcagcatatcggtgagccatgtggggagaccgccgccggctttgatttccatcagcgtttcgccgggctctaaaagcagttgcccatcgtccccctgacgcaggtcggtattttcttctctaaagcgtatgttggtatcgaatgtgatgcgcaggccgctgtcttcgcggctgtaaagtgccacgcggtcatagcacagcgccatggcggactttaaatcgccgtaatagtgcagtgaccacgcaatctcttttgcaatctggctgttctctttcggcgctttgccgtttacaagccagtcatacgcttcgccgtagggcatcacgatgcggcgcttgtagacaatgccctgatattttttcttcagctccacaaacgacgggctttccgctttcggcacgccgtaggtacgcaaacgcagcttttctttatagacgggcttttcgcccgaaagtcgcgccagcaaatgattcggggtgtcaaagtaaatgttgcatatggtggagcgcccgtattcatcggggcgcatatacggctccaaaaccgcccagagcgcctcaaactgtaaggaatcgagcagatatttttgctctacgcgctcaaatatgccggtatagtccgccatggctttcgccctcctctttgttttgtttcttaaattttacttacaaaatgtgatgaaaaggtgattacattttgagcgttagcggagaaaaccgtgcaaaagcaggtgctgtgcaccgttcctacaaaaacaggtgtgttctgctgtgcaaaaagtccattgcgccgcacatatacaaatgatagaatgagataaacgcgtttctatggaaaaacgcaactttgggaggatctgtatgtacacactcgattatttaaattgctttattgaaaaccttgatctgccggaagcgagccgcgcttctctgcgcgagaactgcgagacgctcgtgacgacacccggcgcgattgacgagctggtctctgccgagacgctgctctttaaagattacggcattgacggcgcatacggcgcggaatggaagcccattgtgccgcacatggacgcgctttcggagcggacagggctgcaccgccacgtggtggatttcctgttccttgcgcttgcaagcgaacgtctgcgcgaaaattacagagcggcgggcctgacggacgagctgttctgggacaccatcgccgacctgaaattcaagctcatcgagtgccacgacgtatacgacatttggggcacattcgtcgcaagctggtacccgtggttctacacgatgcaccgctttaagctgggccgtttgcagtatgaggccgtacacttctccggcgacacgctcgtgacggtcggcggttacacggtaaatcccggtgacacggtttacaacatgcacattccgtcctgcggttctttgaaccgcgcggcgcgcatcgaatcttataaaaaagcctacgaattttacaaaaaagacctcgatggcaagccgatggtattctgctgccactcctggcttttgttcccgaagaaccgcgaaattctgcccgagacgctcaatacggtcgatttcatcggtgacttctatatttacgacagcgaggaatacgatgtgttccacgacaagtggcgtgtgttcgcaaaggactttgagaagccgaacagcgagctgccggaggacaccacccagcgccgctgttttaaaaaatggcttctggacggcaaaaagaccggcgcgggcgcgggcatctttatttacgacggcaaggaattcatcaaataagtaaatttgcaggatattttgcaaaagcctgcattgttatgcgcaaaaaggcttgacagaagtttaattagctgatataattttgaattgctgatcggtcatataaattcacgacttgggtgaatgtctctaccggccgccttgtgtgccgactataccgaagccgcttacgggcttcgtgtatacgttcgggcacagggcggcctttttatgtgccgatttacccgaaaccgggtcttgcatagagttgtattttgaaattcatacgcaaattcatctgtcagttttagaaagttggggtcaaacatgaacacggatatcgtcatcatcggcgccggtcctgccggcatttttaccgcgatggagcttctgcgccgcggcagcaaggagaaaattctgctgctggaaaaaggccgttccattgaaacgcgcaaatgtcctaaggcccagaccggccactgcatgaactgcaagccgtactgccatattacaacaggcttttccggcgcgggcgcgttttcggacggcaagctgtccctcagcccggaagttggcggcgacctgccccagctgatcggcgaagacaccgtacagtcgcttattgaatacacggattccatctatctggagttcggcgcggacacgcgcgtggagggcgtgagcgaaaaggaagccgtcaaagaaattcgcaagcgtgccatccagaccggcctgaagctcgtcgactgccccatccgtcacctcggcacagagaaggcgcaggagatttattacgcgattgagcaatatcttctgaataacggcgtggagattcgcttcggctgcgcgtgcagcgacctcattttaaagaacgacacctgcatcggcgtgcacgttgcggagggtcaaaacgaatacgacgtttacgcgaagcagaccgttgtggcagccggccgacgcggcgcggattggtttgataagctctgcgcccgccacggcatcgcccatgcgccgggcacagtggacatcggcgtgcgcgtagaggtgcgcaacgaggtcatggaaaccgtaaacaacgttctgtatgaatcgaagctcatcggctacccgaagccgtttaaaaacaaggtgcgcacattctgccagaacccgggcggctttgtcagccaggaaaattacgataacaacctcgccgtcgtgaacggccattcctataaagataaaaaatccgataacacaaacctcgccattttgtgctcccacaacttcaacgagccgttcaatcagccgatcgaatacgcgcagaaggtgggcgagctgacgaacatgctgggcgcgggacacattttggtgcagcgctacggcgatattctggacggcaagcgcacgtggcagaaagagctttctcgctcgaacctgcgcccctctctgccggacgcggtggcgggcgacatcacctctgccatgccgtaccgcgccatggtgaacatcatcaacttcattcaggcagtcgatcacgtcgtcccgggcttcgccgccgtggagacgctgctctattcgccggagctgaagttttacagcaaccgcgtgaagatggacacggacctcaacacaagcattcacaacctgcactgccttggcgacgccagcggatggacgcgcggcctgatgatggcctcttgcatgggcgtgctcatgggcagaaaactcgcagaacaggaaaacgcataagagaacaagattgcacacatcgcaagttcacacataaaggaacgggccccgccgcggcaattcggcagaagcccgttttctttttgggcttagggaaaaagcagaagaattttcttgcaggcgcagggggaatatgctatactgattatgtatgagtttacatcatgactacattcaaagaaagatggttttatagatgaaattaggtatcggagtcccctacctaagttttcatatttccattttcccttataaatgccgataaaactagatttcatgcgctttttcagaatacccaaaagcataaaaacgtatatatctcaatgccatcccacgcagaaatggcgtaaaaatggcgtagtagatttttgacggtacagctgcgaaaagaatacacactacaaaaaaacaatcacacccggagatgggagctaacccctcatctccgggtgttttctttattggatattaatgttcttgggaggtctgtcgaatgatcgcggatgtcggaagcgccttattggaaactccccaaggatatttctgagaatcactgcgatcgtactgatatacaataatttccggatcatgatacttactgaatccctgagataagaaaaaagtaaagtcactagaggtcgatagaacgagatgtattttctcgatatttgcagatgatacaatttcacgcattttattaagtattccagtcctcaatctattcataagagcataagaaacaattgctgcaaacgtgtcattatgcgttttatatcccaccctgaacgctgtttatcacaaccaccttgaattcatcccaaatttagataaaatataaacacgaaacaaggaggcgcgcgaatgatcacagcagaacatttaagccgaagcttttcgggtaacggtctcaagttacgggatttgaactttcatattgaaaaaggagattgtgttggcttgatcggcccaaatggcagtgggaagcgttcgcttattcggttaattctcggtatctataatccggaccatgggagactgtgggtcatggggaagaatccgagtcttatttgccgtacaccgctgcagatgagccgtatcgaccggaaccgtatgacgttcattcttcccgaatctttacctgatgaacgcgtgtctggaatcgtatctccaaagaaaaacgcaattttcgatgcagatgattttctgaaggagtgttttgaaacattaaagctttctgcgttgctttcatcaaaggtacatcagctgtctcgcggcgaactcgcacgcgttcgcttttatgaagcaatcacttctatgcccgaactgcttttactgtacgagccatttgtcggtgtggacgcctcaatgaaggaacagatgattcggattttactgacaatgaaccagaagtattcaactacaatcctattagcggtgcaaaatctgaatgatatggataaaatttgcactcgagctatcgtgttagataagggaatatgtatatattcaggagacttatctgatctgcgtcatcgctatttactgtcgaatcggttggttttccaaattctcgatggagttcccgactttcaggatcttccaatacaacgattcagttggaatgatggagatttgaaaatcactttcgatcctgaatcagttcgggcagcggacattattgatcatgtcctgcacacctgcaacgcgtctgaaatacttattcacgaaccgcaggtcgaagatttatttcgcatattatattcaagcaaaaaggaggatatgttatgaatagtattgtgttatggttcgatttggcacgacgatcatttcgatcacaatcggtctatcgcatcaatgtattagtcaatctgatttacagtttcatgtcagtacttatcaatgtatccgtttggaatgcgctctatgcgcaaaacgtcgaccctgcagcaacactttcagaggcaattacatacagtgtgatctcctcaacatttttggtgggaatgcagctttggcccggtgtccgcattggtgatgccgtttattctggagaggttggccagcagatggttcgtcccatgaacctgctcgcacagcatgcggcaatggaattaggagagaaaatgtttaatttcttcacatgcattcttccctgcattgtagctgcaaaaattgtatacaatgcactcttgtttcccgccacactcgcggacgttttattttttctattgagtgctcttctcggaaatatgatctttttacttctcaacacaatattgggctatacggctttctggcttggaaatgtttggtatatccaatggtttttgacagcagcaatgtatgtttttggaggagaaatggttcctttttggtttttgccggacaagttgaatatcattacatggtttatgccgttccgctgtgttctgtttataccgatggaaatgtatttagggcgtctgtctatgaatcaaatcattttcaatctttgtttacaagtactgtggctcctcggtttgttgcttttggaacgctttgtgtggtatcgggcacaaaagaaaatcgtagttcagggcggttgactagaaaggaggtccgtaatgttctatctattcttggcaaaacaatttattcgcacacagtggcggtctcaaaacgagtatcgcttttcattcattatgggtatcttggctcaaggtacaaactttgtgtttcggtatctggctttgtatcttttggtttcaaggtttggatctctcaacggatggaattctcgagaattacttctgatctattctttctcacaattcacatacgcaatcggttcaacatttacacatgacctttgcagacagcttccgaatcttgcccgcactggtgacctgaacagttatctgattcgaccggtacactcacttttccttgcaatattcacgaatttcaatgttggatatattacgcactttacaatatctgccactgtaatgattttcagctttatttctctcggtgttacactaaatctttggggcatactttggctagttatcacattggtatcgggcggcattatctccggatgcgtctttttgatttcctcgcttccaagtgttgtagccattggcaatgtttctcttaagaacattacatatgttttcaaggatgttgttcagtatccgctttctattttcggcacacctttgcaaatcattctgaccgttttcatacctcttggattcacgacgttttatccactgcagcctttacttggaaaacaggacatgggtatttttccagtgtttatccaatatttgtctcctctcgttgcaattgtgatggtactcttactactcctcgcttggaggacagtcattaataaatacgaaagcaccggaacataagaaaggggtttattatggcttatatagaattacatgatgttgttaaggatttcaaaatcaaaaatagacgcaatggcgcttttggaaatgtgaaaaacttttttgcaccgcagtatctaacgaaacgcgcggtagaccatatctctctggaaattaatcgaggtgaaatggtcggatatatcggtccgaatggagcgggcaaatctacgacaatcaaaatactcacgggtattctgttgcccaccagcggctatgtaaaagttggtaatcttgagccgtacaaaaatcgaaagcagaacgccttacatatgggtgcagtctttggacagcgctctcagctcctgtgggatctgccggtacaagatgcactggacttgtttcgtgggatgtaccggattgaagaaaagacctacaagaaaaatgtagagatgttctgcgatttgcttggactcgatcaattccttatgcaacctgcgcgtcagctgagtttaggacagaaaatgcgcgcaaatctggcactcgcattaatacatgatcctgatgtagtttatttggatgaacctacaattggtcttgatgtcctcgcaaaggataatatccgcgcgtttctgcgggaaatcaacaaagagaaaaacacgacggtactgttgacaacacacgatatgacagatatcgagagtgtatgcgaccgtttagttctgatcaatagcggtagtgttctttatgacggcggtctcaacgccttcaaggaacagtactccaaaggctacagtatccgcgtaacttttgccgatccaaaagaagcgattcaggatactagatttgaattgattgaaaagaaagacgcagagtcgatataccatgtttctcagtcggattttcagcccggagaggcacttgcttttctggcaagtcactgcaaaatgcaggatatcagtattattgaaacacctatcgaggaaattgttaaagcaatatacaaacacgaagcataacaagaagacaagagtgaactgtaaaaatacggttcattcttgtcttttttattaataatcatttttttgactgctgtctcagcctgccggcagcataacgttcacacagaaaacaaggtcttcttcataaatatccagcaaaccattgtatttttctataatggctcgaatctgctttattcccatgccatgtttttccggttccgcatgtgtagaatgcagatccgggttaactgccaaaacagaggaattgatactgtttcgtaccgaaatagcttcatatccgcgctttttactgatggatacggaaatttgccgcttatccgagtttgctgcggcgtggatagcattgtcgagtagattggttaatagagaagagaagtcgacactatcaattttttggaatttaaggttctctatctgcagctgcatatgtacctgcatctgctgggcttgctgcagttttaaattcagaatgtaattcaatagcgcatttccactgtcaatataagagtactccagattaagcttgtccaaaatctgtgcagtgtaagtacgagcttcatcatacttttcatttcctaaagacatagcgatgaccataagatggttgcgcatatcatgctttaagcgacgcgtattttcatggatagaacgcacattttcttctgtagcacgcattttttccaaagcttcatcggctgtagctaccttctcgcgtagctgaatcgtttcgtccagcaaagctttataatctgcgttcagtcgtataaattcctgttctagtactttctttcgcatagaataacctctttagcggaacgaccgcatgatttgctgcttggcattctctgcccaagcgcgcccaatggggagctctgttccgttttccagcgttatgctgaccgtgtgcagcaggtgcacagcggagcaatttaccagaaagcctttgtgtatacgtacgaatccgtgagaatcaaactgttcctgcatttcacgcatggtggaacgacaggaataacaatctgccgcagtatatatttttacgtaatttccatcagcttcgagatgtgtgatgtcagagaacgggagtcggacggaaacgctgccagaacgaaatgtaaaggcatcgatccttgcggatacttcgtgtgcagcacggagtagtacacgttcgagatcctcatgataacggcttttacgaacaaaatcaaatggtttgtactgaaatgtttcgtatacaagagattcctgattcgtaataaagatcaaaagagctcgattgttccgctgcagcaattctccggcaatatcaaatccggtaagacgcggcatatcaatgtccagtaatatgagttccggcgcaaatgcttcgagctcatctataaagcagttaggatcactggataccagccacgttggagagataccggcacgcttatagcaagcagtacagaacttctgcagttcatcaagaattatgggttcgtcatcacacattgcaattctcatatggcatctccttttctagtgatatgaattaattataacttattaaccccgaagtgtccagcagaagcttctgaaaaccaaacgcgaggatattggtggaaaggaatgaactatcgcaacgagtaaggttaattccatacgtaatcgccatagaaaatcagctactttctaccgctaaaagaactggcaagagtccccctcatcttcctattcccttctctatagatcttctcagccgcttctgcagaagaaaggccaatggttatggcggtctcatagaaggtgggagacttatatttccggttttgcaccctatggcaatccgggcagaccccggtgcgtatacgaatcacttcctgttcctggtaggagagtgcgttgtaagcagagaaaagcgtttctgtcaactccttttggaccagtgtgcgaagcggttcatatgtgtcatctccacaaatctcttcacagctttcttcgccgtcatcgtcggcatactgccggtatgtcggcaccaaaaagctggtaaaacgcaaggagttcgaagaatatatcagtcagagtctgatcatctaacataaatcgctaacgaaagaagaaaagtttcaaattatgccttgagaaaaagagcactttatgctaagattagaatttagtagtgtgctcttttcgctcaggcagaaaggagtaaaactatgggcaaaaacctcaaaggcaaggaatgtggaaaaggtattcatcaaagaaaagacggtctgtacagcgcaagatttgttgaccgattcggaaaacggcacgagaagtattttcagacacttcccgaagcgcgcaactggattgaagacagcaaatacgctgacaaacacgacgatatttttgttcctacagatatgacagtcgatgagtggtttaacttctggatagaaaacattgtgggcgatcttgctcccaatactctcagaaattacagggaaaggtacgaacataatatcaagcccgttatgggtaaaatgcttatctccaatgttaaaccgatgcactgcaagaaggtgcttcttgatatggatgcaaactatgcaggctctaccattcggcagacttatatcgccatgggaaccatgttcaaagcagccaagatgaatgatgtgatcgctaagcaccctatggacggagttcgatattcaaaacctgtgcgtgcgaaagatgacatcaaattcttcacccgtgaggaacaaagcaaatttcttgaagcagcccgaaaatcacacaattacgagcaatacgcgctgattcttgaaaccgaacttcgtaccggtgagctgatcggactgacatgggatgcaatcgattttgagcatcggatgcttacagtaaacaagacactcgaatttcgccatgcgcagcaattctggcgagcgggtcctccgaaaacccagcaaagctatcggacgattcccttgacagacagggcgtacgacatattcaagaaattatgggataacaggcacgagagatatgaatctcctgctttatctgaaactcttgaatatgtggacagacgcacgggcatgatggctaaacttgtgatgcgtgatcttgtcttcatcaactggcgcaccgggcaaccgaacaaaaacagttcttatgatacccacctctacaaactttgcgataaagccggtatcaagcgggtatgtatgcatgctctgcggcacacatacgcaacccgtgcaatcgaaagcggtatgccccctaaaatactgcaaacccttctgggacacgccagcataaaaacaaccatggatagatatgttcatgtaaccgatgaatccatgaatcaggcgatgatccagttccagcaagatgcggtctattaatcagccattcgtaaatggcgtaaaaaatggcgtagacagtaaatcagcaggcagaaaaaaactagtaaaaaaatcggtgcaataccaaaagcgctgatttcggacatttatcagcagtaaaatccccctgaaaacgggggattctgataaaaaccgatatattttaatgcgagaatggcgtaaaaatggcgtaaaatccaaaagccaaatcgcaaaagcccagtaaatccgggaatttttctaaggagaatgataaatatgaaattaggtatcgtcggtctgccgaacgtcggcaagagcacactttttaatgcgatcacgaatgcgggggcgcagtctgcgaactacccgttctgcaccattgagccgaacgtgggcgttgttgccgtgccggacaagcgcctcgataagctggcagaaatgtacgagccggaaaagttcaccccggcgacgatcgagtttgtggacattgcgggtcttgtgaagggcgcgtcgaagggcgagggcctcggcaacaagtttctctccaacatccgcgaggtggacgcagtggttcatgtggtgcgctgcttcgaaaacgacgacattattcacgtcgagggttccatcgacccggcccgcgacattgagacaatcgaccttgagctgattctctccgacattgaggtgcttgaccgccgcattgacaagacgaaaaagatgatcaaggcggacaagaagtaccagagcgagctggagttctttgagcgcgtacacgaggcgctggatgccggcaagcccgcccgcagcgtagcgtgtgacgaggaggaagccgagctgctcgcttccgtcaacctgctgacgaacaagcccatcattttcgccgccaacatgagcgaatccgactttgcaaacggcattgaaaacaaccccggctatctcgccgtgaagaagattgccgacgagcagcacgctgctgtgctgccgatctgcgcggagattgaagccgaaatttccggcatggacccggaggaaaaggagcttttcctcgccgacatgggtctgaccgaatccggccttgaccgcctcatcaacgcgtgctactccctgctcggtctcatctcctacctgaccgccggcaagcccgaggtgcgcgcctggacgattaagaagggcacgaaggccccgcaggctgcgggcaaaattcacagcgatttcgagcgcggcttcatccgtgccgaggtcattgcatttgacgacctgatggcatgcggcaccatggcgaccgcgaaagaaaaaggccttgtacgcagcgaaggcaaggagtatgtaatgcaggacggcgacatcgttctgttccgcttcaacgtttaatcttcaaacaaaaattgcaaagccctccgcttccgatttttcgggatgcggagggctttttgcaggaataaatcttgtaatctttatttgctgtcttcgctgatgatgcggtaatacacctttgcggtgagggcatagacgaccgcatagagcacggagaatacgaggaacgacgcgacggtgcaggtaataaacaccgtttcggagctgagcatcatagcgcgcagaatagcgcggatgatggggtacgcgaacatcacgtggatgccggctgtgatgagcggcaggaagaaaacggtcaaaatctgcgtatggatagagtgctttacttccttttggctgaggccgacctgctgcatgatggcaaagcggttcttatcctccataccttcggaaatctgcttatagtaaatgatgagcacagccgccatggtgaacacaaagccgagcgagatgcccataaagaggaagctgccatacatgctgcgaatttccttcgtgttttcgacacggcactcaaaattgaagtatccgtcttcgtcccagaatacgctttcttcgtccggcatgatggtcgtaacgtcttcgcggatcgcatcgtaaaacgtctgttgttcctcatctctcagtttgccgagcgagatgcagtagtactcggtgggcgtgatgacttgacttttttccgcataatccggcagaacaacgacatacggctttgagacgtaagcgtgatatctgccgcgcaggttaaaggacttcggcgtgggtaaaagcgtatacgtcgtgcccgcaaatgtcatggtgtccggcataggtacgccgtctacactcatataaagcgccgtgcccggttccacggtcacgttttcgcctgtgatgcggttataggtctctgcggaaaagaacagcacgttacgcgtgatggagtcgacctgcgcggtgccgtctttcatgaagattgcagaggaatggtcttcggtttcttctgcggaatcgtagccggtcaggaattcataggacgtatagctgccgcccggaacacttttcagctcatcggtcagaaaggtgtccatgtcgaccatgtggttcgggtcttccatactcaccagaacatctgccgggtagcgtgtgtggatcatatcctcggcgccaaaccacagcgagcaggtggaggacaaaatgacgagcaccatggtggagagaatgcagatatttgcaaggccgacggcgttttgcttcatgcggtacagcatgccggaaacactgatgaagtggcttgttttgtaataataatttttgttgcggcgcaaaagctttaaaagcgcgatgctgcccgccgtgaacaggaaatacgtgccgataatgacgaggaggacggcaacgaaaaacagagagatggcgaggacaggctcacgggaagacagaatggaaagcgcatagccggagccgaggcacagcacgccgagaatggccatgaacgctttcgtcttcggctcgcgctcgccgacgttcgtgccgtgcagaagctctatggggcgcgaaatgcgcacacgaaacacattcgagatataaatcaaaacgtagattacgccgaacacaacagcaacgtactgcaggcttttcgggatgatgtgaaagccgtaattcggcgtgatgcgtatcattttggcaacgatgagaaatgtgagtttatcaagcaaaatgccgacggcgcagccgcctacaataacgataagcgccgtgaaaagcgtttccaacccgatgacgcgggcaatgtggcctttgttcatgccgagcacattatagagaccgagttcttttttacgctgcttcatcaaaaagctgttcgtgtaaaacaaaaatataacggcaaacagcatgacgacggtgctgccgagcgtgaacatcatttgcgacgtgggaccgagctccgtattattggaaagcgaatttaaaatgtagctgaccgctgccacaaaaacgcccgccagcataaacggcacgtagctgcggcggtgctttttgatgttctgcgccgccaagcgcacatataagttattcattttcgtgccctcccgttacgcgcctgccgccatggcggtgagggtatccgaaatacggtggaacatctcttcatttgtggaaccaccgcggtaaatttggtggaacacaacgccgtctttgatgaacagtacgcggccggcatggcttgcggccttagtggagtgcgtgaccatcaaaatcgtctgaccggcgcggttaatctcgccaaagagcgataaaaggctgtcggacgcgcgggaatcgagtgcgccggtgggttcatccgcaaggagaatctgcggtgaggtgatgagcgcacgcgccacggcggcgcgctgcttctggccgccggagacctcgtacgggtacttctggagcagatctgcaatgccgagctgctgcgcgagcggcagaagcttcgcctgcatctccgggaaatgcttgcccgccaaaacgagcggcagaaaaatattatcctgcagggtgaaggtatcaagcaggttgaaatcctgaaaaacaaacccgaggttctggcggcggaacgaagcaatctctttttcgccgatggtcgagagtgcacggccgtttaagaacacctcaccctccgtgggacggtcaagcgccgccaggatatttaagagcgtcgttttgccggagccggactcgcccatgatggcgacatactcgccgcgctccacggcaaatgtgacattcgtgagcgcctgcacgcggctgccgccgaaccgcgtggtgtatacctttttcaatccattgacttccaaaacagccataaataagtctcctttttcaattcgttgacaaaagtatacagcaaaaagcggacgcaaaacatcgattcaccttacaaaatgaaaggcggagcttacatttttgtaaggtcactccacctgtaaattgctttccttcatatcgagcgaaaaggtgctgcctgcgccgggggcggactgcacggaaagcgtgtggccgagcatatcggcggcgcggcggctcagatacatgccgagacccgtcgatttcttttctgccctgccgttatagcccgtgaagcccttttcaaaaatgcgcggcaggtcttccggtgcgatgccgatgccggtatcgctgacctttaagaccttattctttgtgacggtgacggtcacggtgccgctttccgtatattttacggcgtttgcgagcagctgacccaaaatgaacgccaaccacttttcgtccgttaagacctgcaccggggcaatatcgcactttaacgcgatgtgcttgcggacaaactgcccggcatactgccgcacgacgcgctttatgacgggttcgacctcgactttggcaaacacaaggtcgtttgatgtgctgtttaggcgggcgtaattcaaggccatttcggcatagcggtctatgcggaacagctctgcggaaagtgcacggctgcgcggggtatcttcttcgccgagcatcagccgcatggcggagatgggcgttttgatctggtgtacccacatggtgaaataatcggtgttctcctcctgcccacggcggcggtcggtctcactttgggcgagcttggtgcacagcatgcgcacggcttcgtcataacacacggccgtgctgcccgagggctccgggaggtcatcgcgcgattcgggcagattcaaaagcgccgattccaaccggcgaaactgcttatgaaaccgcagatagcttaaaataaagcttaaaagccccaccgccgcgcacagcagcgccgcgtacaaaacgggatcggcgggcaaatcgtataaatagaggatcaccgcaaaaatggcaaagcacagcagcaaaaacgcgatctgcaaaatgtgtgcgcacaggtatgagaaaaacagcgcgctttcttttttcttcatgggtcacctcacaaaacgacatagccgctgccgacgcgcgtcgtgatgaaatcggtcaggccgatgccggaaagcttcttacgcaggcgggtcatgttgacggtcagcgtgttttcttcaatgtacaggtcgtattcccaaaggcgcgtcatgagcgtttcgcggctgacgaccttgccgcggctttccataagcgtctgcaaaatgcggaactcattgcgtgtgagctgcaccttttggccgtcgtgcgtcacggtctcatcgttcaggttcaagaccgcgccgccacgctcaatgaccggcacacggtcgccgaggtcgtaggtacggcgcaaaacggcgcgaatttttgccataagcacggaggggtcgaacggctttgcgataaaatcatcgccgcccatgtctaccgccatcacaatattcatattttccgacgcgctggagacgaaaatgatcggcacggcggatattttgcgaatctcgctgcaccagtggtagccgttaaaaaacggcagggtgatgtccatgaggacaagatgcgggtcgaaatccgtaaattcgcgcagaacatcgcgaaaatcgcggacacagcgcggggtaagcccccaagattcgatgatgcggctgaccgcacccgcaatagcctcatcatcttcaacaatcaaaattctgtgattttccatagtatctccaatttacaaatcattagcctcgcttctccccgagtacccgcttcaaaaacgccgccgagcgctccatgcatttcagctgctctatggagccgaaatgttctgccgcaaagctgccggtgtaaccggagtcaagcaaaacacgcatcattttttcaatgggcagatcgccgtcgcctaccgccacgggatacagcttgcggtttgcgaccgtgacgcacgggctgccggtgttttccgtaaacgcgcggtctttgcagtgcacggacgcaatgtacggacggaacagggaaaagctcttcaccgcgtcctcctcattataaaggaaattgccggtatcaaagccgcagcgcagaccgggcacatgctgcataaaccacatgagctcatcggtgcgggagtacggcgccgttaggttatcgaactcctccatgacaaccgtgatgccgtacttttccgcttccgctgtaagctccgttaaagatgccgccatgcgcaggcggcgggcttcatactttgcgctgccgcgcaccatttcgttctccgtcaaaaaacccgccacggcaagcaggaacttgcagtttgctttttcgcagcagtctatgacgcgcagagattccgcacggtcgttttccggggaacccgtctcgctgccgaaatcgaaaaaattataaatgccgttcacgcaaagaccggctttttgcagcgcaggcaaaattacatcaccctcgtttttgatgcggttcgcgtcgagctccacaccgtcaaagccaaagcgttttaccgccgcgcacacttcatctaatgtaatattctcctgcttcatggcttctgccatgtgctcgtaaaaaacagaaattcggttcatacaaacgccacctccaaaagtattttcagcatagcaggcaatgcggattttgtcaatgtaaaacccgcaagcagtacgcgttccgctgccttttccgaaaatttttcccggcggcacaatgtgacagaatcaaaatttgtcccacatgtatactggtgtcgggaggtgaaagcgtgaccgtttatgccgacctgcttttcatcgtgaacctctacatagacgcgcttttgctcagcgcggtacggcgttttttacggctgccgcttacgggaaaaaggcttttgctcgcttccgtgctcggcggggtatttgggctttctgccctgctgcccgcgctgccgggggttgttttgtttccgctggcgctgttggaatcgcttgcgctgtgcgcggcagcgtttgcgccaaagccgatgacgcagcttttaaaagccgtttttttgctgtttttgtttggcgcggcgctttccgggcttttgacagctgcggcgtattttctgccgatacacggcattttgctcgcaaacggcgcggtgtattttaacatttccgcattgacgctcattttgctcacgtgcgtctcttacggcgtgctgtacggcttcgaccgcctgtttcgcaaaaaggagccggacgtgtttttcgcaaaactgaccatcacacggcagggtaaaaccgtcacgctgccggcgaaaattgacacggggctgacgctgacggagcctttttccggcacgcctgccatcgttgcggatcggcgtgcgctcggtgacatattgccgccgaatttcggaatgcaaagcacggaaaatgctgtttctatgcggctcatcccgttttcttcactcggagcggacggtgttttgcccgcgtttcggccggatgcggcttcgctttcgggcatatcaatcgaatgctgggtggccgtgaccgaccgcacgctttccgcagggagttttcaggcgctcgtcggcgccgccgtgtgtgacgccgcacagatacagggtttaaaacccggaaaggacatcccatgaaacacgattttctcacccgcatgcgcgaaattttcgctcactttttatcaaagctgaacgaagacacctgccactacataaacggcccggaaacgcttccgccaccgctgacgaaagcggaagaacaggtggtttttcagaacatccgtgacggaaaaccgaacgcacgcgaccctcttatcacgcataacctgcggcttgtcgtgtacattgcgaaaaaatttgaatcgcctgccgtgaacgtggaagacctcatttccatcggcaccatcgggctcatcaaagcggtaaatacgttcagcgtggagcgcaacatcaagcttgcgacgtatgcttcgcggtgcattgaaaacgagattctgatgtacctgcgcaaaacggcgcagctgaaaaacgagatctcgctcgacgacccgctgaatgtggattgggacggcaacgagctcctgctctccgatctactcggcagcgaccccgacattgtgaatcgcggcatcgagcaggaatcggaaaagcaaacgctgctccgtgccgttgaaaagcttgacccgcgcgaaaagcaaatcatggagctgcggtttgggctgaaccggcaaaaggagcacacgcaaaaggaagttgccgatgcactcggcatttcgcagtcgtacatctcaaggcttgaaaagcgcattttgcaccgattgaagacagaaatggagaaggcgggataaacacgccataaacacaacaaaaagcagatgtatctaccgattttggtgacacatctgctttttctaaaaaatacaccggttttaaagtattcggtttatacgagcttcagatatttgaccccatacggcggcagctccaccctgccgtggatgtcgcttgtttcgccggttaaaaaatcgaccgctttgtactcgccgcgggcgtctatggaacacggcgcgttttccgcattgacggcaacaaacactgtctcatgatcacaatgacgctcaaacagcagatttttattctgaatggtgatgttcttataatctccgtaattcaatgcgcggctttcggtcttcaccttcgcgagtttttcgataaacgcggtgagttcgttttcgacgggtgcatcgaagcacgggcgcagggcgctgtcgccctcatgcttttcgccctttgcgccccactcgcttccgtaatacaggcacggaatgcccggcatggcgaacagcacgccgtacagcgggtaaatttgcttttcgtcgtttaaaatgctcgcgatgcgcgttacgtcgtggttatcggcgaagttcatcaggtgcttgccgcggtacagcgtccacggctccgggccgaactgccgtccgagcgaatgcgcaatctcaaagagattcatcgaattgaacgcagagtaaagccctttgtagcactcgtagttcgtcacgctgtgcagcaggccgtctgcggtgatgcggttgtaatcgccgtgaatcatctcgccgatgagcacaaactccggttttttgccgtcgcagtacgcgcgcaggcggcgcatgaaatcttcattcaacatgtacgccacgtcaagacgcaggccgtcgatgccgaattcgtcgatccatttgccgacgcagtttaaaaggtactcgacaacggtgggattatagagattgagcttgacaagctcgtaatgtccctcccagccctcgtaccaaaagccgtcgttataggcgctgttaccgtcgaaattcaagtgaaaccagtctttatagggagagtcccactttttctcctgcacgtcacggaacgcaaaaaagccgcgtcccacatggttgaacacgccgtcgagcacaactttaatgccgttttcgtgcagcgcatcgcacacggctttgaagtcttcattcgtgccgaggcggcagtctatttttgtaaaatcacgcgtatcgtagccgtggttgtccgattcaaacaccggggaaaaatacaccgcgccgatatgcagctttttcaggtgcggaatccaccctttgaccttttgaatgcggttcacgcacacgccgtcgttcggcatgggcgcaccggtaaagcccaagggatagatctgataaaacaccgtttcatctgcccacattgttatatccgttcctttcaaaagagttatgccgattgcaacttaaaacgtgtacatgccgtctgccgtctggcggatatccgcgttatagaacgctgtcatggcctttaccatgtacgcagtgtccttttcgcccgccgtttccacgcaggagtgcatcgcgagctgcgggatgccgatatcgaccgtgttgagcgacagatgaccgtttgagatgttgccgagcgtagagccgcccgccatatcggagcggttgtggaagatcatcaccggcacctcggccttacggcagatctcgccgaacacggcggcggaaacggaatccgtcgtatacttctggtttgcactgtacttgacgacgatgccgccgtttaagtagcagcggttcgtctggtcacacttttccgtgtagttcgggtgcacggcatgggcattatcggcggaaagcatgaagctatccggcattttgcgcagccactccgcttcggggatattgagcgcggcagcgatgcgacgcacggtatccgtgaggaacgtggaatctgcgccctgctttgtcagcgagccgacttcttcgttatcgaacacggcgctgatgagcagcttttctttgttttccgcgttcaaaaacgcttccgttgcggagaacgcgcactggaggtcgtcgaggcgcggggatgcaataaattcgttctccatgccgaatacaacgccgtgctggcgcggatagaggaacatatcgctcgagatgacgtcttcctttttaacgcctgcctcttccgcgatgagcgcgttataatcggcgttttcgccgccgagcaagggcagcagatcgacctgcgggtttaacttgtgatctgccatgccgcgcgtcatgtgaatggcaaggctcgggatgatgcacaggtcgcggtcaatgttcaaaagcacgctctttacgccgctttcggtacgcaccacggcgcggccggcaagcgacagcggacgatcaaaccacgtggaaaggatcatgccgccgtagccttcggtgttgagctttttgtagtgaccctctacggtgatctccgcgccgctctttacacggaacgtcggggaatcgctgtgcgcggagacaatctgcataccgttatagttttccggcacggagaacgccaaaacagaagagccgttgcgcgtcgtaaagtagcgcttgcccttttcgagcgtccaggtttcgttttcaagcaggcgaatgcagcccgcatcttccaacattacacatatatttttcaccgcatgaaaacacgacggagaagcgtcgataaacttcagcagcttttcggtggtttcagaagtctttaacatttcggtcattcctttccttgtttctattcatcatagcacaaaacgacaaatatgggtagagcaaatttcagaaaaaaagaccgccgcaccgaaacagtacgacagtctttaaaaaatgaattcatttgcacgcatttccgatggcttcgttcacgcgctcgcgcagatcaggcagatagaacgatgtgcgcggatagtttgcaaacgtcatgctttcgccgtctccgagcagttttaagacgctttcgcgcccgagcttttcttcggcgagcgacaacgcgcgcatatcataaagcgccatggcgaaaaccttttgccgcagcgacggcagcgggccgttttcgccgggatagacggaaaatccgtcgccgcccgggaacgcgccgcctgcgtccgtcacctggaacggatcgataaccgctttggagagctgcgagttccagaagttatagccccagtgcaggaagcccgtgatgtgatacttccacatctgcacgcccaaaatgcgattgcggtttgagggcatcgcgaggaaacggttgcccacgtccacgcactggctgcagcaggtgtacgcccacagatccggcacatcgttttcgataaacggcgtgatatggttcgtcgcgacgacggggtgcttgacgagcccctccgtgtagtaatcatacgacgagagcgcgtcgcgcagaatgcagccgggcaaatacggctccacaacagctttcgcctttaagtagtccgccttgtgctcctcgctcggctcgtccgaaatgtggaacataaggtcatttttttcaacgcctacttcttcaaagaatgtaagcagctgcggcagcagcgcatgcaataatgccgcgtattccgggtcggttgccgcagtatgccaaccgaatttcagcttgcgttcgccgttttcggtgacgtagatattcggcgcacattttgcaccccactgtgtgaagaagtgggaaatctcaaacttagaaatgccgcagtcctttgcggtttccacccagcgggcaagccttgcgaaatcaaaatgataacccgcgtcgttctttgtgatctccacaagctgcgtgcacgggcgttctttgccgatctcggtatcgagcgcgggagtgaacaccggcgtcaggatcatgttcatgccgtgttccgccgccatgcgcatatatttttctaacaatgcccagtgctcttttgcgtaaatctccacgccgtagcgcgctgcgatgcagtctccatggaaccactgcgtgaacgtgagcttctgctccggcaaagtgaccggcacgaccgtcaaacggaaaatttcgcttttgccgtttgcgctgatctccacagggtaatcgccgcccgcggcatcgtcgttcactttgaggctcacccatagcacctcgcggccgttgacgttcaccgcgccgtccgtgacgggatacagcacatccgggaacgtgctcggctctattgtgatgtagtcatcatcgaacctgtccgggtatgcggaaagcgtgcacggcacatagccctcgcggtacaccgccactttaacgggtgcatcggtgcgcacctcaatgtagtgctcgccctcgcccgtgacgatggcctgaaacgcggtctcttctccgcgcagagcgctcgccttcgggtacggcgcaaaggtcttttcttcctgcgccatgacttttttcatcggtgaaagaagctggatcgttgtctgcatggatttttcctcccctaagttgaccgtgtcaaactgtgtaaaatccggtatataacgttcgccggcggcactgcgcttttggcagaagccgggcaaacccagttccaacatataattttgtaccttgcggctctcccgcagggtgatgcggcggttgatgtccgcaaattccggctcatgcaaaacacgtcccatcggcgtatactggctcatcaggctcacgggcacgcccgagaaatgctgtttgatgagctccagcgcctgcatggaattgcgcgtgtggccgggcaaaatgagctgccgaatgatgatgcccttttgcagcatgccgttttcgtcgtacacattttcgcccgtctgtcgcaccatctcatgaatggcaacaagcgccgtttcacagtagtgcggcgcattggaaagccgcacggcgagatcgtcgtccgcatatttgaaatccggcaggtaaatgtcgacgagcccctctaacatgcgcagtgtctcgaccgattcatacccgccgcagttgtagacaacgggcacgcgcggcttataaatgcgcagcgcttcggcaatttgcgatgcaaagtgcgtcggcgtaacaaggttgatgttgtgcgcacccatagcttcgagtttttttatcgtctcgataaattcttcaaccgtaaaatccttgccgtgtaggctttcaccggagatctcgctgttctggcaaaacgcgcagcgcagcgagcagccggtaaaaaagatcgtgccactgccgcgcgtaccgctgatgggcggctcctcccagtaatggagcttcgcgcgcgcaatgtgcattttgccgccgctttggcagtagccgcgcatgatttcacggtcaacaccgcattttcgcgggcacagtatgcaaacgctcatgcgttttgttccctgagcatcaggaacccggcgttagagccgcgcttgccgcgcgtcacgcggtgtgaaaacagcagatcactgttgcacatggtgcacacgccgcccgttgtgatgtgctcgggcagcacgcctgcacctaataagaacgcacggttgcacgcccaaagatcaacgtggaatttgccgttgccgtcgtccgtgacgaatttgtcgctgtccggcagcgcgaggaattcctccgcacacggggcgtccacctcaaagcactcttttgcaatggacggaccgatggccgcgagcaaatcctcggggcgggtatcaaattcctcctgcattttctctacggtagcttttgccatgccgttcaccgtgccgcgccaaccggcgtgcgaaagtccgatagcatgatgaatggggtcgtagaagtaaagcggcacacagtccgccgcgtaaatgagcagcggcagattcggctcatccgtcacaaggccgtccacgctttccatgtccttcggcttccaaatacccgtgccggcgtttttcatcgtgacacggcgcacgttcgtgtggtgatcctgcgcacccgccgtaatgttctctacaggaatattcgccgcttgagcgatgagacggaaattttcttttacattttcgtcgctgtcgccgcggttgaagccgaggttcatagcagcaaactcttcttcactcacgccgccgatgcgcgtggagaagcagtgcgtaaggtacgggatattctcccacgccttaaacgtcagcagtcccacaccgttttccttgattgtcagacgcatatcggcgatatttgcgttttcggcgcggcgcggtttttcgattttcggcagcggaatggattttcgactcacgataataccctcatacttctgcttcacgcgcagctgaccgcagaattcatagccgcacttttcgcacttaaatatgctgcgcaggctcttgtttttcacagtccatttgccgcggcgctttgcttcgccgccgcatttttcgcacgtgaaatgcagatgctctttttcgatcaacgggctgttcacgtcgcagatatacgtcgttttaaacgtgatgcgtctgtaaaactccgggtccttgcagtcctgaatgaacgggcggaacgtatcctttgtataaatgcgctccagcaccatggcggacagcacgctgtcgtcgagcgcgcggtggtggtcgagcgcaccgtcatcaatggaaagcagctctgccgctttggaaagcccaagctgctccttgccgtcctcgtcaaggcgcttttccacgtactgctgtaaatcgacatagcgctgcaaaaacggaacggtctccccgccgccgaaatagcggcagttttcaatcagcgccagaatgtccgacgtgccccacgtggcaatcacgcagtcgcccgcccattttttgaagcggctcatcacctgcatgtacgggcgtgcgtccaaaagattcgcatccgtaatgttggtgaggtccgagataaccgcgctgatcttttttgtcacctgcggtttgacaaagcaggaaaaccggtctgtgatattcagttgtgcatcgagcttgaccgcgccgaactcgataatctcattgataaagccgtggagacggcggctgtacgcaccgttccactccagatccaaaataacgatattcattggctctccgtgtgtcttttccgttggtcaagtttatgaattacttctttttcgcagcctgcttcatgcgcagctctttgctcagcaccattttgcgcatgcggatgctcttcggtgtgatctccacaagctcgtcgtccgcgataaactcgagggactgctccagagagagcacggtgtgcggggtcagcttcagtgcgtcgtcggagccggaagcacgggtgtttgtcgcgtgcttcttcttgcagacgttgatgacgatgtcgtcgcccttcgggttgctgccgacaatcatgccctcgtaaaccggtacgcccggcccgataaacaggcggcctctgtcctgtgcgtagaacaggccgtaagccgtggactcgccggtctcgtgtacaacgagagaaccggtgctgcgctgctgaatgtctcccttatacggctcgtagcaatcgaacacgtggttcatgatgccgttgccgttcgtgtccgtaaggaactcggagcggtagcccatgatgccgcgggacgggatcttgaattcgaggtgcgtggtgccgctgtcgcgggtacccatgttgagcagctctgcctttctggtgccaagcttttccatgaccgcgccgacgtagttatccggaacttcaatcatcaaaagttccatcggctccagcttcttgccgttttcttccttgaaaataacactcgggcgggagacctgaaattcgtagttctggcggcgcatctgctcgataagaatggagaggtgcagctcgccgcggccggataccttaaacgtatcggcggaatcggtctcttccacgcgcatagcaacgttcgtttcaacctccttaaacaggcggtcgcgcaggttgcgggaggtgacatacttgccctcgcggcccgcaaacggggaattgttgaccatgaacatcatagaaacggtcggctcgtcgatcttgacgaacggcagcggctccacgtgctccgggtcgcaggcggtctcaccgatgttgaggtctgccatgccggaaacggccacgatgtcgccgagctctgcgctctctgcgtccacgcgcttgaggccctcaaactggtagagcttcgtaatgcgcgcgttgcgcttttcgtcgcttgtgctgctgcagatggtaacggtctggccgacctttacggagccgcgctccacacggccgataccgatacgaccgacgtactcatcatagtcaatgttggagaacagcacctgcgtcgggccgtcaaggtcaccctccggcgccggaacatcgtttataatggcttcaaacagcggcttcatgtccgtgcccttttcgtccggctggttcatggcgtagccgtcacgtgcggaagcgtagaccaccgggaaatcgagctggtcttcgtctgcaccgagctcaatgaagaggtcaagcacttcgtccacgacttcaagcggacgtgcgcccggacggtcgaccttattgacgacaacgaccggctttttgccaagaccaagcgccttctttaaaacgaagcgcgtctgcggcatacatccctcaaacgcatcgacaagcagcagaacgccgtctaccatcatcagaatacgttccacctcaccgccgaaatcggcatggcccggggtatcaacaatattgattttgatgtcattgtacatgacagctgtgtttttggagaggatcgtaatgccgcgctcacgctccaaatcaccggagtccatgacgcgctcggttacggcttcgttgctgcggaaaacgccgctctggcgcagaagctggtccacaagggtggtcttgccgtgatcaacgtgtgcaataatggctacgttgcgcaaattttctctttttcccatctttatcaatccctttctttatcgttcttaacttcaaactgcttcaaaaaattcaaaaccggccgcgccgttttgcatgcgcgggatacggcaaaaaacggattaaaaactcggtttgctcgctaaccgaaatattataccacttttcgcgcgttttgtgaatatgttccgccttggcgaaaccgctgaaatattgggtttttgcgttttttcttttgtcctgctttccttgacggcgggctttgttcgtgctattcttgtattgattttgaaacagaggagtgcaaaaccttgaagaggatcttgaatttcggctcactcaatacagactatgtttataaggtcgaccacattttgcagggcggtgagaccattcaaagcgaaagccgcaccgtgttcccgggcggcaaggggttaaaccagtccattgcgcttgtgcgggcggggctttccgtctgccacgcgggactcatcggcacggacggcgagcacctgcgcgatttattgaaccaaaacggcgtggatacctccctcatcgaaacgcgcgatatgccgggcgggcacaccgtcattcaggtcagccgagaggcgcagaacgccattctgcttttcggcggctccaacggggctgtggatgaagcatatgccgaccgcgtgcttgcgcaattcggcgcaggcgacattcttctgctgcaaaacgagatcagcgcgctgccgtatattcttgaaaaagcccatgcgcgcggcatggagatctggctcaatccgtccccgatgaacgaaaacgttttaaagtgcaatctgtcgctcgtttccgtgttcgttttgaacgaagtggagggcgaacagctgaccggcacaaagattcccaccgctattttggataagctccttcaaaaatacccgcacgccgccgcagtcttaacgctcggcagtaaaggcgcgtggtacgccaaagaagataagcgcgcgtttgccccggcggagcttgtccgtgcggtcgataccaccgcggccggcgatacgttcacgggctatttcatgcgcggtatgctggatgggctttcgccgaaaaaatcgctgaccctcgcggcaaaagccgctgccattgcggtctcgcgccccggtgccgcaccgtctattcccctatatgcagaagttacgaacgaaaggaactgaaaatatgagtgatttcagagttgcagtacgcagaacgaacgagtgggacggcccgtccatgctcaaaatttacacaccctacgtcgaaaagacgcactacacgcccgacaccgaagtgccgacgctcgccgagtacgtgcagcgcatcgacacctatacatacggccgtatgtggattctgacggagatcaacaaccagacggcgggattctgctttttgaccgaccgcgatattccgaaagacgacctgttctctgccgacgcacagctgtacgtctccgaaaaatgtctgcacagcggcgtgggcacgtctttatacagcctgatgctggacatcatgcaccatgcaaattaccgccgcgttacagcgcacatcaatctgccgaacgatgccgccgtggcattccacaaaaagatgggttttcacgaggtctccgaaacggacggtgttcttttaatggagcgcgccattgaaccggaagacccgaacgcaaagcgcttcacgaaagcctacctcatcttagcgcaggactacgaggccgcgcgtgagcacgccgccacatttgttaaagaaggtacggtggtataatgggcccctacgaatacgaagtggcaagcatcgacggcgactacgccgttttgcgccgaacggacaatgacacgcacgatgaaattctggttgctcgcgcgcttttgccggaggagatcgacattggcaccgcgctgcactacgaaatgttcacttattccatcgtttaacatttaattattggcaaaaatagccaaatatttttcccgttgatttgggtaaaccgttcattgaactcgcgttgctttcttggtacaatgatacttgtaaactaacacgcagcgaagaggttctacaaacgcggtttacccttattttctacggaacggtttaccttaatctttttttaggagttgttgtatcatgtccaaaccgtccggtgccatcgacatgacgcagggcaaaccgatcaacctgatgcttcgttttgcgctgcccatgatgatcggcagtattttccagtcgctttattccatggtggactccgccgtgctcggccgcttcgtcggctcgcacgcgctggccgccatcggtgccaccacgtccacaacgggcctcatcctgctgcttgcaaccggcgtgacgagtgccatttccatcgtgctttcgcaatacgtcggcgcaaacgacaccgaccgcgtgcgcaagggcatcgtcgcctccgggtggatcacccttttgctcggcgttgttctgggtctcatcagcgttttcgccgcgcggccgctcatgcagcttttaaaaacgccggaagacgtcatcgacatgtccgttttatacattcagattgtctgcggctgcggcatcgcacagtttgcgtataacgccgcggcatctatcctgcgcgcactcggcgacagcaaaacaccgctgtatttcctcattctgtgctccattttgaatgttatcctcgacctcatcagcgtcattggtctcaacatgggcgttgcgggtgtcgccgttgcaacgatcggctcgcaggccatctccgccgccatctgtatcctcgtcatgttccgcaaataccccgatctgatgccgaagcgccacaccctgcgcccggatatgcccgttagccttaaaatattcggcatgggtgcgcaaatggctctgcaaagcctgtttctttccgtcggcatgatggtcattacgcgcgtcatcaacagctacggctctaacgtcgtcgcggcgttcaccgtcggcagcaacgtgcagaacctcgccgtgatgctgttcagcaatttctcgttcggcttttccgtctatgtcgggcagaacttcggcgcgaaaaacgcggagcgcatcaagcttggcgtgcggcaaatcttccttcttgtcggcggtctgagcttttttgcaggcgtgctgacactcatttttgctgagccgctcgtctcgttgtacgtcaagccgaacgagaccgaagtcatcgcgtattcgctcgaattcatccgcattcaggcgtggttcttcccgttcctcggatggatctggctttataacagcaccgtcaagggcatgggcaaaatcaacatttccatggtctcctccgttgtggagctgtgcagcaagatcggtctctcgttgcttctgcccatctggatcggcaccacaggtatttggtttgccgcgccgatcggctacattctgggcatcatcccgctgctcatctactattacagcggccgctggaaaaagctgctcaccgtccccgccgcagaacccgcaaaggcgtaaaatacaacaaaacggcaaaagtccgaagcacctaaaccgtgtttcggactttttattctatcttaaaatttcaccccagcatcacgtccaaaagcatcattagcgcaaagcccgtcacaatgcccattgtcgccgcatacggctgcgctttctggttgcgctgacactcggggatgagctcgtgcaccgcgactaaaatcatcgcgcccgccgcaaaggacagcgcaaacggcaaaacggcttcaatgtacacggcaagcaaagcgcccaaaacgcccgcaatcggctccacaaagccggaagcctgcccgatgaaaaagctcttccttctggagcacccctcacggcgcaaaggcagcgagaccgccgcgccttcggggaaattctgcaagccgatgcccacggccaccgtcacggcacccatcagcgcttccggcgtatagccgccgtttttcagcgcaccgaacgccacgcccacagcgagcccttccgggatgttgtgcagcgtgatggaaagtaccaacaaaatgatgcggttcagccgtgcgtttttctcgccctgcgccaaagcggagcgccgctgcgcgtaggtcacgcatttatcggaaccccacatgaacaacgcaccgcagagaaacccgagtgtcgccaccaaaaacgcaggcatgcttcccgccgcctccgcgcgctcgatggccggctgcaaaagtgaccaaaagctcgccgcaaccatcaccccggcggcgaagccgagcatcaaattgagaattttggggttcggcgatttaaacagcaccaccgtagcagcaccaagcgccgtgacgagccatgtccccagcgtcgccaacaacgcataaaatacaatatcattcattttcagccctcctaattttattatattgagagagaaaaaatgagtgaaaaaagcacgcggtttttaaaaccgcgtgcttgccgcattaaattgatcggataatcttccacgcttccgtcagccgctccaagctccacgcggcgttcgcggggctagtgctcggcagaaccgtttccggcaagtcgatctctttcgccagatagttttgatacagcttgtgcgccatttgaccgtttgtacacacatgcgtgatgttcgctgtcgataaaatcacggaaagatcattcggcacaacgtttttgatgctcgcgtcagacgagcccgtcacgtcgcacgaggcaatgacgtcccacaaggcaactttatgctttagcaaaagcgccttcttttcggggacatcccccggcaccggttcaccgaaaaccgcgctcaagacgcgccaaaagcggttttgcgggtgcccgtagaaaaacgccgcttttctcgactgcacagacggaaacgagcccaaaacgagcacgcggccgttttcgtcgaacaccggcggaatttcgtgctgcaccatcagtgtaccttctcggcaaaatccttcttgcgctgctcgtaggcctccatgttttccgcttcaaacgcaagcttcacatcgcccgcgcccatcaggttcaaaatgtactttgtaaacggcggattcaaaaccaagatcggccccacaaggtatgtgccgaagaagttgtttacgcggataccctcgtatttcgcctttatattgagccccacacctttgtttttcacgaacaagccgtgcgattcatccggcgtgtaggccatcgtgaactgcgtcttaaagcccatgatgacattgccgtcaaattcgccctcaaagtcgctgttgtggcggtgcatcatatcgcgctttgcgtacaaacgataaagcccaaggcactctacgcggctgccgtcctcgttttcaatgtaatcgccgaagatttcgagcgcattgcccgtgaaaaggaacaccgtgccgtcgtcaatggctttttggattttctccttcagcggcatcaacttgcggatgacctgctcctgcatacgctccgtcatgggacccatatacacaaggttcattttttcttcggtaaagcgcacatcgtcgctgaatttcgtgcggataaactccgcttccggcagcgttttttcaaggtagaccatgttgtacgcgtcgccgaacaggttgcagaattccgggaaaaggacttctattttcatttcgtctcgccctccttctcacgttcgatcatcttatcgcgaatgtcatttgccaaacgaatggtgtatacgtcgtacagaataaagactgtatccgcttctttcgagaccgccgcaggcgtatcgctttcatcgcgcatgtgcacgatcttctccgccggcacaccggccagaagcgtgcgcacatacgtatcgtggtggcgcgcaccggcaatgacgacctgcacgatgctcgggtcatttaaaaactcaaaatcggtgtcgtagaaccacgcggtgttctccacggtgtggcgcgcatcgaagtagtcgtcgagaaacatcacaacggactttttgcccggcgcgttacggatattttcaaacgcacgggagcacgcaatggggttctgcccctttgcaaggtgcagaatgtactttctgccgttcacttctttttcagagtaacgcgtctcgctgatgcccattttctccatagaattgcggattttttcttcggaaaggccgaattcacgcagcgtcgcaatggcggcaagggcgttataaatattgatgttcgtactgttcaaaagcgggtattccgatttttttccgcccaccgtcacgttcattttcatgtctttcgtatcgatgtccgttgcaaggtagtcgatgtccggcgagcggtagccgcaggcttcgcagtgcacacggccgatatgatggtaacgcacaatgtcgtgcacaagcgggccgtggcatttggggcaggcaggcacatcatttacgatattgtcgcattcctttttgtccgtgtcaaggtggtcgatgccgaaatatacgcggtcgttttcgggcttaatggagctgcaaagcgggtcgtcgccgttcaaaacaagctttgtgccctttggaatttccttattcagaatgtcgaggataaactccgcgtgcgcgttgcgcttataagaatcacggaaaatgttcgtgcacagcacaatgtccggctgcatgtaggggtaaatgttcggcgcagagcgctcatcgagctcaaacaccgcaaggtcacacttcggcttgccgaaaaagtgactgttcgcaatgagcgtagatgccacgccggtcgcaacattcgtgccggagcggttgcacatgaactcgatgccgttatcctccaaaacatcctcgatcatgttcgagacagtcgttttgccgttcgtgcccgtaatgccgatgatcttcttcggtttcggcatgcgcccgataaaatccgggcacagaataatagcccaagaacccggcatggacgtgccctttcgcccgatgagctttaaaaccagcgccgtaccgcgggcgaacatcagcgcaaaataaaagcgtaaatttcgtttcattttcttcattccttaaatttgaattttccgtttatcgatacgcatgattatactacttttagacgtgaactgcaagatgaactgcaagataacgccgttttgaattgtttcggctctgaaattgcgaatatttaggaatttttcataatcacggattgatttttcacaaaaaagactgtatgataaagaaaagcaatccattaatttaggaggagttcaccatgaaaactttacccgtagcggtacaggtttattctgtccgcgatgacgctgagcgcgattttaagggcaccatgcagaaaatcaaggacatgggctatgacggcgttgagcttgcaggcctttatggcatgaagccggcggaagtcaaggcgattttggaagaagtgggcctcgttccgctttccgcacacgttccgttccaggagctcgaagccgatatcgaaggcacggtcgcacagtacaaagagatcggcatgcagtacattgccatcccgtatctgatggaagaagatcgtccgggcaccgagaagttcctcaagaacattgagaccttcaagaagatcggcgaagcctgcaagaaagtcggcatcacgctgctttaccacaaccacgatttcgagtttgtaaagatgccgaacggtcagtatgcactcgattatatctataccgagattcccgctgacctgctccagaccgagcttgatatctgctgggtcaaggtcgccggcgaagagccggtcgattacatcaagaagtacgccggccgcgcaccggtcgtccacctcaaggacttctacaaggaaggtaagccggccaacatgtacgagcttatcggcattgagaccgagaagaaggaagaaaccggcaagtttgagttccgtccggtcggccacggcatgcagaacattccgccggtgctcgatgcagcactggaagccggctccaagtgggtcgttgtcgagcaggatcagtcttatgacacccccgctctcgaagccgtgaagatgagccgcgattacctcaagggcctcggctggtaattttgctttaagcaagacataagaatacatattttcaaggcgtactttctctccgaaagtgcgccttcattatattcgcctgtcggcgaatgctatagtccttcggacaataaaaagaaaaacggctcccggcgcatgaaagcaccgtggagccgcgtatgtataagcgagatattatgcgtccttcttttcctcttcgtcttccggcggaagcacggatgcgcagtgcgggcatttcgtcgcgccgatcttcacgtcatccatcaggcagtacgggcaggttttcgtggtaggagccgtttgttttcccctcaaaatttccgatattgctgcggtttccgacagttttttcttgcagaagtattgttgaaaaccgtgaaatatgctatactgttttatacttttccgagatatacataggacgctcgatggtttaaggagatgcacgcatggcatataagatctggctttttctgtggtactttgtgcttgcttccttctgcggctgggtcgcagaggtggggtacatcggcatggtataccgaaaattcaaaaaccccggcatgctgaacggcccgtactgcccgcagtacggcctgatgattgcgctgccgtgggcggcattgacggcgctgcattggcagacgtcgtttgttgccacgctgtttttctgcctgatttcaagcttccttgtggaattcacgttcgcgtggctgctgcgcaaaacaacgcacatccgcctgcgtgattactccaaattcaagtggaatatcaagggctacgtttccgtacccgttgccaccgtgcgcggcgtgtgcttctcgttcattgtggtgttcatcgtgccggtactcacgtcacttctgcactacgtcaaccgcaccgtcggctgggtcatcctctatgccgtcctcggcatcatgctgctcgacatcatcatcacgtccatcaccgtgcagcgcttgaatcaccagtttaaacgcttatccgaactcggagaccgcgtgcgcgaggcgagaaacgccctcggcaatgccgtcaccggcggcgccatcggcgcagcggaggccatcgatgacctcgacctgcaaaagaagcttcaggaagcacagaagaccgccgacgaaaactacacggcactcctcaacaaatcgaacttcttaaagcgccgcttcatgagcgcctcgccggatatgacgaacgagcagtacgaaaaggaattaaaagcgtaccgcatcacgacggaagatcgcaaaaagcgctccgccgaacgctggaagcgcaatcgctatgaatatgaagctacattcgaaaacccggaagaccgcccgtttgcgttcggcatgaacttcacaaaactcttctggatcttcttcatcggctgccttgccggttttgtgcttgaagaatgctgggcgttcttcatcgcgcaccagattgagttgcgcgtcggccttgtgtacggcccattccagcccatttacggcggcggcgcagccatcatcacgctgtgcctgtataagctctacaagcaggacgacatcatcatttttgttgccagcggcatcatcggtgcggcattcgagtatctgtgcagttggggacaggagatgctgttcggcaccgtttcgtgggattacagcggcacgccgttcaacattgacggccgcacaaacttgatgttcgcgctcatctggggcacgctcggccttatctggatcaaagaaatttaccccgccatgtcgcgcatgatcgaaaaaatcccgaagcgcccgggcgctattctcaccattttgctcgttgcgttcatgctgtttgacgggttcatctcctgcgccgcgctgacccgcgccaacgagcgcgccgagggcatccccgccacaagctcgttccaaatgttcctcgataagcacttggacgacaactacctcgcgctcgtctacccgaacatgcagaaggtcaacgaagacggcacgaaaagcgaaccgctgaaagacacggtaaagaacacgtaaacgcaatccgtccatactgcggcaaagaaatttgaagctgtttcatcacgaattaaaaggaacccaccgtatcgctttcacacatacggtggattccttattttatcgtattattttcgattcagcgtacgctttctacaaacgttctgaacgcttttctgccctctgccgtgcatttgtaaacgcctgcgttctccagcacctttacaaacacctttcccacttcctgctgcaagatgtgctcggcattcgcttcgttcatttccgggtggtcgcgcttcacctgcgctgcccactccgcatgctttgcgatgctctccatgcttgaaacatcgccgtttttcagcatcacatctttcagggtcttcagctcgtctttcagtctggacggcaaaaccgcgagacccataacttcaatgaggccgatgttctctttcttgatgtgatgatattcgtcgtgcgggtggtatacgccgagcggatacttttccgtcgtgatgttgttgcgcaacgcaaggtcgagctcgtatacgccgtccacacagcgcgcaatcggcgtgatggtgttgtgcggctcgccgtccgtctccgcaaaaatgaacgcgtcctcgtccgtgtagcttctccacgctttcaatacgtggtcggccgcgtcgatcaggcgatccgggtttttatggcgcaaacgcagaacggagaccggccagttcaatatgcccgcttccacatcttcaaagccgtgcagcgtgcagtgctcctccatgttcgcacgcgccatcgcgaacgtatagtggccgccctgatagtggtcgtgtgtcaaaatagaaccgccaacgatgggcaaatcggcattagagccgaggaaatagtgcggaaactgctccacaaaatcaaacagcttgcggaacgtgctcttgtcaatctgcatcggcacatgctcgccgcagaacacaatgcagtgctcattgtagtacacatacggagaatactgcaaaaaccaatccgcatggttcaccgtgatcgggattgcgcggtggttctgtcttgccgggtggttcatgcggcccgcataaccgatattctccttgcacagcatacaggcaggataaccggaagccttcattttctttgccgcagcaatggccttcggatctttttccggctttgaaaggttgatggtaatatcaatcgcaccgaaacgcgggtcgttatacacccactttaaatcgcgcgccacacggtcgcggcggatataattgcagtcgccgcaaagcttatagaaccagtccgtcgccttttccggggattccttgtaaagtgcacgaaacgtgcggttcacatcggacgggcgcggtgtcaaaaggcccatcagtttcgtgtcaaataaatcgcgggacgtcgcaccgtcctcgatgatgccgcgctttacggcttcgtcgcaaagaccgtccagcaaaagtgccaggttttcgctctgctccgcttcctcatccgcgtaatcctcttcacaaagcgcctccaataaacggttgcgcgtgtaaatcgtgtcttccgcttcgatgagccccgtgcgcacgccgtattcgacaagcgccttgatttttccgaaaagcatactttttacccccgtatagctaaaaattcagaaggagagcgtaaaaatcagcgcatcctctcttggttctgtataaaaattgcggcgcacacccgcttccgtaaagccgagcgaacggtacatcgcaatggccggcaggtttgatgtccgcacctccagcgtgatgaaaacgccgccgttttcccgcgctttttcgatcagcgccgccatgagcgttctgcccacatcgtggccgcgaaactccgggaacaccgcaatattatccacatagctttcgccgagcaccgtgtgcatgccgccgtagccgagcacctcatcttgctgcatcgccaccaaaaagcacgcggcaggattatcaatctcctccgtcaggcttttttcgctccacggttccgaaaagcaaagcttttcaagctccgcaaggcgcgaaacgtgctccgccgtcatcgaaacaatctgcataaacgctccttaaaaaccgagatgctgctcaaacgtctgcaattcctcgcagatcttgtcgcggcacttgcggtaggtatttaggtccccgccgtagggatcgtcaatgtaatgcggcacgtaaatcttctccgccggcacacccgcctgcatcaaaatgtacgcatgggttttcgacatcgtgaaataaacgtcccacacatcgatttcttccggcgtaaagcggcgcgcaatgtgaccgctaatgtccacgccgatctctttgcagaccagcaccgcattttcactggggtgctgcccgtccagcgcggaaaggccggcgctttggcacatgatattctcaaagccgcgctgctccatttcgtggcggaaaatgccctccgccattgggcttctgcacgtgtttccggtgcagacaaacaaaattttcatctttattataaacctcgaatacttctataatcggtcgtatttcgtcttccaaaatgaaaacgctcccgaacgaccgctacctatcatagcacagttcgggagagaattctactaagtattctttaattttcaatgaatgacaacaaaacaacaataataaacaacattgtgccgcacaaagctgctgaaaggcgcacccgcctacttcttcctgtaaaccagaaagtcaaatttaatctcggtctcgagcacatcgagcgcgcgcagacgctctccgccctctacgtccgtcttccagtagtacggcgtcatggagaacagcgcttcaatgctctcctgcccgttcaccgtgataaacttttgcacacacgcacggccgaggtattcaaacccgtcgtaggccgtgtcgtgctcttcgttctcatacggctctttgtataaaacctctttcatgccgtacagatgtcgcgcacccggcaccgcaaggatcatcacgccgcccggcttcagtaccctaaaaaactcctccggcacaataggcgcaaaaacgtccgtcagcacatctgcactgttttccgcacacggcaagtgaaataaactcgccaccgcgaaatcgatgcccttatatttgcccgcagccgctttcaccgcgaatttcgagatgtccacgccggaaaccgaaccgtttttcgctttggctttttcatataaagccgaagtgtaaaagccctcgccgcagcctgcgtccaaaacaacgccgttctcgggcagatatttgtccgtcagctccgccagtttgtcacggaacgcatcgtagtagccgccgctcaaaaacacgcggcgcgcgtccaccatctgctttgtgtcgccgggaatcttcgcgtgcatctgctttacgggcagaagatgcacatacccctggcgcgcaatatcataagaatgtccgtttgcgcagcgcagcgcgcggtcttctctttccaacgcgctgccgcatgcgggacagcaaaatatcatcataaacccttagcccttcgcctgataccagctcttaccgcttccggcctctgccagcatcggcacgctcagctgcaccgcgtttgccatttcttcttccagaattttcttcaccgtgtcgctttccgcttccgggcactccacaatgagttcgtcatgcacctgcaaaatcagttttgcatcgagcttttcggctttcaaacggttgcgcacgtgcaccatcgcaatcttgatgatgtccgccgccgtgccctgaatcggcatgttgcgtgccacacgttcaccgaacgcacgcatgttgaaattggagcttgcaagctccggcagatagcgtctgcggccgaacagcgtctccacatagccgtttttcttcgcttcctccaccacgcgttccatatagtctgcaacgcccttataattgcgcaggtaatcgtgaatgtagtcctcggcctcacggcgggaaacaccgatgtcctttgaaagcgagaacgcaccgatgccgtacacaatgccgaaattgaccgctttcgcgcggctgcgcatctgcggggtcacaaggtcttcgggcatatcgaacacacgcgccgccgtcatggtgtggatgtcgcgcccaaggcggaagtcctcctgcatctgcgtgtcgtttgccacgtgcgccaatacgcgcagttcaatctgcgaatagtcggcgtccacaagcacatttccctcttttgcgatgaagaaccggcggaattcacgcccaagcggcgtgcgcaccgggatgttctgcaaattcggctcagtcgaggaaatacgccccgtgcgcgtttcagtctggttgaagctcgagtgaatgcgcccgtccgccgtgatggctttcagcaagccctcgcagtacgtggaacgcagcttcgtcagcgtgcggtagcgcaaaaccttatcgaccgccgggtgcacaccgcgcagaccctccagcacatctgcgtttgtggagtatccctttttcgtctttttgccgtgcggcagtccgagctttacgaacagcgcttcgcccagctgcaccggggagttgatgttgaattcgtaccccacgtcttcataaatttctttctgcaatgcgtccacctgctcagaaagcacctcgccgtaggtttttatggcctcgcggtcaacaaggaagccgctttcctccatctcgcccaaaaccaaagcaagcggaatttcaatgttctccaataattcgtgctggccgttttcgtcgatgcccttttgcagcgccgcacaaacagcgggcagcacagccgccgcctgcacgttcgcgtcctcatatgcgggcacggcaatgccgtattccgccgccaaacgcagcacaccgtaatcggagcccgaggggttcaaaagatacgccgcaagctccgtgtccatcacagcgttttcaagggaagtcctcaaatgcagcgccgtgcggtgcagctttttcaacgcaaacgtgtactttttcgtcaccttactgccgaggaacgccttcaaaaacgcgtcgtccgcatccacgaccgcaatcgccggcttgcccgcgtcgaacttaccgttaaacacaagctgctttaattcgtcgttttcaaacaccggcacaaagtacgccgccccctcgtcctcacaccggccgagcaccgctgcgccgtctttataattcttcacgggcagcaaagccgtttcttcggcctgtgcgctgttcgccgtcggcgccgcgccgggggtcaggtgcaggcgttccatcagcttaaagagctccagccgcgtcatgagctgcgccgcagctgcggggtcgccctcgccgggaatataatgcgcaagctccgtatcaatcggcgcattacggcggatggtaccgaggtcgtagctcaaaaacgcgttgtctttggaattgatcagcttcgttctcatgccggacttgatgtccagctcatctaaattgtcgtaaatatactgcaaagagccgaacttgcggatcagctcgcccgcacccttttcgccgatgcccgcaacgcccggaatattatccgaggtatcgccctgaatggccttgatgtcgatgagctgcttcggttccacgccgtacgtctctttgatatacgcctcatcacacagcgtcacggcagactgaccgaatttcgtcgttgcaaggcgcaccgtcgttttcggcgagacaagctgcaggctgtcccggtcgccggtcgcaatcatgcacgtattgtccgtgttttcgcacgtttccgcaaacgtgccgagaatatcgtctgcttcccagccctcgcacgtcacgattttatagccgaggtcgccgagcagttcctttaagaccggcatctgcgccgcaagctccggcggcatgcccttgcgctgcgccttataacccgcataggccttgtggcggaatgtcggcgctttcatatcgaacgcgatggccaccgcgtccggctccgtttcgtccttcactttttccagaatgttcaaaaaaccgacaataccgtttgtaaactcgccgcttttcgttgtcagcagcttaatgccgtaaaacgcgcggtttaaaatgctgttgccgtccagtaccaaaagcttcacgctgatcttcctttccgttacgggtcaaaagacacgtctttgttttctatatacactttctcaagcaatttatcgaggtcgctgagcgtttccagctcgcccgccatgcgccggaattccgccgcaccgcgcagaccgtgcatgtaccacgccacatgctttctcgcttcgcgcatgccgcgcccttctccctttgcggcgcacagcgcatctatatgctttttaatgaccacaatgcgctccgcaagcgtcggtggcggcataatacgcagaccgctgctgaaatagccgttgatctccctgaagatccatggattgccgagcgccccgcgcccgatcatcaccatgtcgcacccggtctcgttcatcatgcgcacggcatcctgcacacattttacgtcgccgttgccgatgacgggcacctttacggcttccttcacctgacggataatatcccagtctgccggcggctcatacatctgtgtgcgcgttctgccgtgcacgcaaatggcgtccacgcccgcatcttcgcaatattttgcgacctccaccgcgttcacgctgttttcgtcccagcccttacgaattttcaccgtcacgggcaggtcgaccgcatttttcacggcacggacaatgtccccgcacagcggcggctttttcattagggcgctgccgcagttattgcccgcaattttcggcacagggcaacccatattgatatcaataacatccggcccggccgctgcggcgcgctttgcggcagatgcaaagatgagcgggtcgtcgccgaacatctggatcgcgacggggtgttccttttcgccgagcgtgataagctcctgcgtttttttatagttatactgcagcgctctcgtcgagaccatttccgtcacgcagtacgctgcgccgaacgagcagcaaagctcgcggaacggccggtcggtcgcgcccgccatcggagccagcgccgccacaccgttcaaagtcagatttccgattttcatttttatatccttctgatttttctgtatttttaattttacttatattataataccgaactgccccgcacatttcaataaaaattccttaaaaattagaatttgcctttaatctaccctttatttgtgttatactgggcttaaatatagatgcgggaatctctcttttaaaaaggcattacacgcctttcgggagaccccctaattgggtctcccgcgcaaaaacagtccaccggactgtttgatagcaatgcgaagcattggtttctcccagtcctgatttttgggaggcaaaaagttttcgtcgtctgcggacgacgactctgggcttcaccccgagaccccacgaccgaaccgcaggttcggtttgaccttcatttgaaaaaaggtcgatcaaaaacttttaaccacgcttacaagaaacctcattctaaattcacatacaggaggacattcacttggatacctcaaaatcttatgtgcgcgatggtcgcatccagcaaaagccgcgcggcaattatttcctcttctccttccttttcggcctcgctctggcctttgtcatctttgtgccgttcatgatcgtagacggcggccgctttctgttctacggcgatttcaatgtgcagcaggtgccgttctaccgcatcgcgcacgatgctattcgttccggcaacatcggctggaatcatttaacagacctcggcgtcaatttcatcggttcctattcgttctacctgctcggcagcccgttcttctggctcaccattccgttcccgggcgagtggctgcaatacctcatgggcccgctgttcatcttaaagttcggctgcgcctccctctctggctatatctatctgcaccgctatgcaaagaaccccaacacggcgctcttagcgtctctcttatacgcgttctcgggatactccatctacaacattttcttcaatcattttcacgaagccatcatcgtgttccctttgctcttagccgcgctcgatgaatacatgtacacaaagcgccgcggcatttttgcgctcatggtcgccgccgcgtgcatcgtgaattattatttcttcgtcggcatggtgacattcacggtcatctacttctttgtgcgtctgctctccggcagctggcacatcacggtcaaagatttcctcctgctcgcgctcgaagccgtgctcggcctcggcatcgcgtgcattctgcttgtgccaagcgttctgtgcatcattcaaaactaccgcgtttccaatcccatcagcggctggagcgccctgctttatgaccgcaaccagcgctacattcacattttgcagtgtctcttcttcccgccggatcttcccgcacgcccgaacttcaccccggattccgaatccaaatgggcgtccctcggcgcatggctgcccatgttcagcatggccggcgtcatcggctggatgcagctaaaacgccgccactggctgaaaaagatgctctgcgttctgctcttcatggcgtttattcccggcctcaacgctttgttccagctcatgaacgcgtcgtattacgcacgctggttctatatgctcacgctcatgatggccgccgccaccatgatggcgctcgaaaacccgcgtgttgattggcgccgctccttaaagtggacaacgcttatcacgctcgccatgacgctcgtcatcggcctcatgcccacgctcaccaaaacggacggcgagattaccgatgtcacattcggcctcgaaaaataccccacgcgcttctggacatacgccgccattgcgctcctctcacttgcactcgtcggctttgttcttgcattttataagcgcggctcccgcccgttctaccgcgctgcgtccgtctgcctcagcatcaccatcgtgctgtattctgttttcttcatcgcgctcggcaaaacacagtcggattacacctatgaccacatcatcccctacgccttaaacggcggcgcggatgtcgccatagacgacctgcgcgacgacaacgtccgtacggatttctacgaaagcctcgataactccgccatgttctgggaggtacagtccattcaggcgttccacagcatcgtccccggctcgctcatggagttctacgattccatcggcgtgcagcgcgatgtcgcttcccgcccggataccactcactacggcctgcgcggactgacaagcgtcaagtatctttttgacgacgatcacgataccgagtatttcgccggcgaagactacgccgaccccgccatgccgggctggatgtactacggaaacacaaacggctttgacatttgggaaaacgaacattacattcccatgggcttcacctacgacagctacgtcaccgaaaaagattacgaaaacacaagcgaaagctaccgcgagcttttgatgctcaagggcatcgtcctcaccgataagcaggtttcaaaatggggcgatatgctttctccgctcgatacaagcgaactctcctacaccaaggaaacctacaaaacagattgcgaaaaccgcgcaaagctcacctgcgatacctttgaatatacaaataccggctttaacgccaccatcacagcaagccgcgacgtgcccgtgttcttcagcatcccgtatgaaaacggctggtcggcctacgtcaacggcgaaaaggtcgatatcgaaaaggtgaacgtcggcttcatggccatccgcgtcaacgccggcaccaatgtcaagatcgagttcaaataccgcacgcccggcctgtttctcggcatggcaatcaccgtcgtgtgcgtgcttctgttcgcactttatatggtactcatgcgcacgatcttcaaagaagtccccgtgccgctcacccgccacaatatggtgctgcgcccgctctcccactatgcaaaaaagcacggcgcgcattttgaaaacagcggacttattcacgtaaaaccgcgcagtcaaaccgaccgcgctttggaaaagaaagaaggttttgataatgacgactgaacgtaatattccggtcttgtatctcgtcattccttgctacaacgaggaagccgtactgccggagaccaccaagcgtctgaccgaaaaaatgcacaccatgatccgcgccgagcaggtcgatcccgaaagccgcattctctatgtcgatgacggcagcaaggataaaacctgggcgattatctccgaatacgccgaagctattccctatgtggacggcgtaaagctcgcgcacaaccgcggccaccaaaacgctctgctcgccggcctcatgaccgccatgccgctgtgcgactgcgccatcagcatggatgccgatctgcaggatgacatcaacgtcatcgaccgcttcgtcgaaaaatatatggagggctgcgacgtcgtctacggcgtgcgcaacaagcgcgagaccgatacgttcttcaagcgcaccaccgcagaaggcttttataaattcatgaagattctcggcgtagacgtcgtcttcaatcatgccgattaccgtctgatgagccgtcgcgcgctcgagggcctttccgagtataaggaagtcaacctgtttctgcgcggtatcgtgccgctcatcggctttaaaagcgactatgtctattatgaccgcgccgagcgtttcgcgggcgaatccaaataccccttaaaaaagatgatctccttcgcgctcgacggcatcacgtcgttcagtgtaaagcccttaaagctcatctccaacctcggcattctcatctccgttctcagcatcttcggcctcctgtacgcgctcatctcgcacctgtgcggcgtcaccgtcgcgggctggacagccatcgtcgcgtccatctggctgctcggcggtctgcaaatgctctgcctcggcgtcgtcggcggctacatcggcaaaatttacagcgaagtcaagcagcgcccccgctttctcatcgaaacccacctcaaagccgaaccggaagaaaaagtcttggacgaacactgatacgctaaccaaaccggatcccgaattgtctcggcagttcgggatttcttttcccgctgctcacggcatgttgagtttaagaggtacattttatgaaaaaattcgctttcggagcttccaaatttttcctcggctccgttttcggctgcgtttttgtattgctcctgttttttacgcaatgtacatacgccaaaaagcagacatttctgctctcaaatattgctctgcttctgttcggcatcgcacttcttgtgctgtttctgtccctcgaccgcctgcaacaggtcaagctttcgtggcgtcggccgaccgtatcgtccgatgtgctcatatacggtctgtgtctgcttttattttccgcacagctctatatttcctataacatttatttcgaaaccggttgggacgcgggcctccttacagaaaacgcccgcaatctgatgcacaagcagtcggtcgatatccgctatttttccaactaccccaataatctgctgtactttttcttcgagctgttcgtcttcaagctgaataaatatttcagcattttctccgatacacagcaggctttgtgcgtcatcaccgtcaactgcgcactcaatacgctttcctgtctgctcgtttataaaaccgccgcgcagctcacactaaagctatacgcttttttcggcttttttctcgcggtactcagctttgggctttccccgtggaacgtcatctgctacacagacgctttagggctgattttccctatccttacactttatgtattcatccgtccggcaaaacacaaatggctctcctatgtgctttccgccatcatcggcacactcgggtattttatcaagccacagtgttttattttgcttatcgccgtttttttgattgaaggtatttacgcactgtccgaaaagcacctgttaaaaccgcttctgctctcacttttgacagtcgccatcacctttttcgccgttaaagccggtacaggttttctgtgttcccactatcacattcagcttgataacgagcaaagcttcggcattgcacatttctggatgatgggtcttaacccggaaaaaaaaggtgtctattccgccgaagacgttcgctattcccgttcttttgtcaccgcttccgagcgcacgcaggcaaatatcgccgtcggcaaacagcgtttacaggaaatgggctttttcggcacgctcaaacagctcgcgcaaaaaatgctcacgctctataatgacggcacattcgcatggggaaaggagggaaatttccttcaaaccgtttttgatccgcccaatacaaaatccgctcccttcctccgcagcatctactaccccgacggcagccgctacttgtatttcacaaccttcgagcaattcatttggctcataatcttgctgcttggcgccgccggtctgttcagcagcttcaatcataagcacgcaaaaaccttaaatatcctgtggctcacatggatcggcctcaccgtctttgagctcctgtttgaagtacgcgcccgttatttgtacaccaacgttccgcttttctgcgtgcttgcagccgtcggcatcgaaaatatccgccgcctgttctgccgcatcactgaaaagctctctgcgcgtcttcccgcaaaaaaaatccgtataaccccataacgcacaagacccccgctcccggaaaactccgaaagcgggggtctctatgtttattcggttaccttaggcaaaaacgattacatcaagcttctgtacagctcggcaatctcctcaacggaggtgtcgcgcgggttgcccgggcagcaagcatctgcaaatgcgctttctgcgaggaactgtacgtcctcttccttcaggatgcccttcaggttttccggaatacccacatcttcgctcagcttcttcacagccgcaatcgttgcatcggcagcctcttcggcggtcatcgcgtcaatgccctcaacgcccatggccttgcctactgcgcgataacgctcgcctgcaacggacttgttgtactcaaggccggtcggcagaatgatggcgcaagccacgccgtgcggggtgtcatacagagcggagaggccgtgcgccatggagtgtacgatgccgaggccgacattcgagaagcccatgcctgcaatatactgaccgagtgccatgccctctctgccggcttcggtgttctgcaccgcgccgcgcaggttctcggaaatcaggcgaatggcttcaaggtggaacatatcggaaatggtgcaggcgcccttcgtgatgtaaccctcaatggcgtgggtcaaagcgtccataccggtcgcagcggtcagccccttcggcatggaggacatcatatccgggtcaacaaccgcgatctccgggatgtcgttcgtgtctacgcagacgaactttctcttcttttccacgtcggtgataacgtagttgattgtcacttccgcagcggtaccggcagtggtcggcacagcaatggtgaacaccgcgtgcttcttcgtcggcgcaacgccctccagagagcgaacgtctgcgaactccgggttctcaatgatgatgccgatggcctttgcggtatccatggaggagccgccgccaatggtcacgatgcagtctgcgccggaaaccttgaaggcctcaacgccgtgctgtacgttctcaatcgtcgggttcggcttgatctcgctgtaaacggaatacgggaagccggccttgtccagaagatccgtcaccttctgcgtaacgccgaacttcaaaaggtccgggtccgagcaaacaaaagcttttttgtagccgcgcgcctgaagctcctccggaatcttttcaatcgcacccttgccgtgataagaaattgtgttcaatacgattctgctgaccataaaaaacatctcctaatcccaaatatgggaattttttaactaagttaattatacacctgtccgcacagattgtttgtaacaaaactgtaaatatcagttcaaaaattcttcgttcagttccacgccgaattccttcgcgatggctctcaaattgtcgtctgtaatggtctggcgaattttaccgccgcccgccgtaatagcaagcatataaatttgcgccgccttctcgatcgtgtgcatgaggccaaacgtaatgtcgtaatccggtccggaaacgaacaagccgtggtgcgcccaaacggccgcgtcatattttttcatcagctcgctcgtcgccatcgcaatgtccgcgccgcccggcaccatccacggcaccacgcccacgccgtcggggaacaccaccgggcactctgtggcgctctgccataaagcacgcgtaaagtcgcgcgccgtcagcggcatgatgtacgtcatcgcaatgagattcggcgtgtgcgcgtggtaaatgacacggtaagcgccgttcgtcgccgccttgcgcacactgtggttcataaagtggcttgggaattcgctcgtcgggcgcgcgccgttctcaaggccccacacaatgcgccagctgtcgcccgcatcgttgatctctacaataccgatgttgtgctccgggtcatcctgcacattgcgcaaaaacttgccgctgcccgtcgtgatgaaatattcgccctttaagttatctgcctgcacgcccatgctgttccactcgcgcggcgcggtgaaaaacgggcggcactgctccacttcctccggcttcatgcggtaggtcaggttgccgccgtttctctcgtgccagccctgctcccagccatccgtgcacatgcggataaaaccgcgtactgcgggaatttccgtcatcatttttatatacctcctcagcgctttaaaagcacttcgttttcgtattttttaatttcagaaagccacgccatgtcgtctgcgggaacattctgctccttgcagtattccgcccaaacatcgccgaacggcatcgttttcaactcctccgcgcggatcatcaaagacgtgaaatcctgctcgttctgcagcttcgtcagctcctccgtcggctgcaacagcgcgaacaacagcgccttctgtacattgcggaagcccgtcacccacgcgccgatacggttgatggacgcgtcaaagtaatcgagcgcaatcttaacacgacccgaaagcccgccgcagcgcacaatctctttcgcaatttcctttgtctcgtcgtcaaacagcaccacgtggtcgctgtcccagcgcacaccgcgcgtgatgtgcagcgcaatctccgggaagaacgtcagcatcgccggaattttatcggatacgacctccgtcgggtggtagtggccgttatcgagcagcgggatgcacttatctttattcatcgccgcatagctcagcgcaaattccgcactgcccaccgtgtacgcctccaccccgataccgaacaccttcgattccacacacggctttacaaggttaaaatcgtacggctcagagagaatctcatcgagagactctttatacagcatgcgcggcgtcatgcggtcggcgggaatatctttcagtccgtcgcccgtccagatgttcatgatgcacggctgaccgagctcctccgccagatactgcgaaatgcggatacacgccttgccgtgctccacccagaatttgcgcgtctccgggttcgggctcgagagcgtcagcgggtcgcacttcgggtgcgaaaaatacgtcgggttaaagtcacatcccagcccgcgctccttacagaacttcacccacggcgcaaagtgcttcggctccagcttatctctgtccacccagccgccgttttcttcggtgaagatcgcgtagctcgcgtgtaaattcagcttcttcgtgccggggcaaaggcgcagcacctcgtcgatgtccgccatcagctcctccggcgtgcgcgcacggccgaggtagttgcccgtcgtctgaatgccgcccgtcagcggggcattcgggtcgccgtcaaagccgcgcacgtcgtcgccttgccagcagtgcagagagaccggcacgcttttcagcgtgttgatggcagcgtcggtgtccacaccgcgctcggcatagcgctttttcgccgcctcatactgtgtcatatcgttcatcctttcctaagcgtgttgatttttgttaaaatgcggtctgccgtctcgtcttttgagagcatcggcaactcctctgtttcgtcttttgtcagcagcgtcaccacgttcgtatcgcccgcaaagcccgcacccttcgtgcgcaggctgttcgccgcgatcatatcgaggttcttgcgctcgagctttccacgcgcgttttcaatgagattctcggtctccatcgcaaagccgcagaggaactgccccgcgggcttgtgcgcgccgaggtacgccagaatgtcctgcgtgcgctcaagctcaatgctcatgccgccgtcgtgctttttgattttctcctcggcgaccgttttcgggcggtaatccgccaccgccgccgctttgatgatgacgtccatcttcggcgcacggctcgtcaccgcgttgaacatgtcttccgcagattccgctttcaccaccgtcacaaacgggggcggttccacggtcatgttcgcgcagacgagcgtcacatccgcaccgcgcatcgccgcacggcgtgcaagcgcgcagcccattttacccgtcgaatggttcgtgatgaaccgcacggggtcgatcttctccgccgttgcgcccgccgtcacgaggattttctgccctgcaagatctttctccgcaccgatcgtctgcatgatccagtcaaacagcgtcttttcggaaggcattttccccgcgcctatatcaccgcaagccaaatacccgctgtccggctcgatcaccgtgtacccgaatcgtctcagttttgcaagattatcctgcacaatggggttcaagaacatattcgtgttcatcgcaggcgaaatcaaaatcgggcagcggcacgccatcacggtcgtcgtcagcatgtcgtccgcaatgccgttcgcaattttgccgatgacattcgcgctcgcgggggcgatgagcacaatgtccgcgcgctttgccagcgcaacgtgctccacgctgtactggaaattgcggtcgaacgtatcgatgagacacttgttgcccgtcaaagtctcaaatgtaatggggttgataaaattcgtggcgttctgcgtcatcagcaccgtaatatccgcgtgctgctttttcagcatactcgcaagccccgcaattttgtacgccgcaatgctgcccgtcacgcccagtaaaaccgttttacctttcagcattttatcgtcctttccgttttgtttttactctattataatacacttttcagggttcgtaaattttaatttcaaagctgtcccgtatcacgtcgcgcgcctgctgtacgctcgcaagctcgccgtccgcgatcatctgcacgatgagattaccgatggccgtgccctctgtcgggcccgcatacacgggcagcccgcaggccttcgccgtgagtttattcaaatattcgtcccgactgccgccgccgacgatatttaaactcgtatatgctttgcccgtcagcttttcaagtgcctttatcgtctcggcgtagctttccgccagactgtggtatacacaggagagcatctccggcaccgtcggttctttgaagccctgcttcataagctcgtttttcaccgccgcacacatgtttttcggcgccaaaaagcattccgcatttacgtctatgcggcccttataatccgccgcgctttgcgcaagctccgtcaacttatcaaagctgttctcgtctccaagctcctgccgcatattctgcagcatccaaaggcccatgatgtttttcaaataccgatagcggtactcatacccaccctcgttcgtaaaattctgtgcacggctctcgtcgttcgtcaccggcgctttcagctccacgccaatgaggctccacgtgccgctcgaaaggaacaccgcgttctcatccttcgccggcactgccaaaaatgcggaagccgtgtcgtgcgaagccgcaagccgcaccgtcaaatcaaagccgaccttctccttcacgcgctccgtcagcccgccgagcgcttcacccggcttgtgcagctcgccgaagattttctccggcaaacccacccgcgctatgatctccttgtcccatgtcttatgttctgccgagaccatcgccgtcgtgctcgcatttgtgtattcgttcacggccacgcccgaaagcctgtatgtcagataatccgggatcatcaaaagcttttcggccttttcaaatacatccggcatttcttttttctgcgccgccagctgatacaccgtgttgaacttctgcatctgaatgcccgttcttccgtacagccacgcaaacggcaccgttttttccagctcgtccggcaccgtctccgtgcggctgtcgcggtacgccaccgccgggcagatgcgttctccgtttttaccgagcaaaacataatccactgcccacgtgtccaccgccacgctctcgggcgcaatctcacacgccgcaatgccgtctatcacttcgctttcaaggcggtcaatgtcccagcacaaatggccgttttggtcttccgcaccgtttttaaaacggtagatttctttcagcttcagttttccgtcctcgagccaccccaaaatgtgccgcccgcttgaagccccaatgtccaccgccaaatacgttttcatataagccctccgttttttcgtttacagcaatagtataacaaaaaccgtgtccaaaaataaggacgttgttttcacttaaaactatctttattttaacttttcttctgccgcacaaaattttctcccgccaaactacacaaatctgcgcttcacttttcggcacacagcaaaagaattccgccgaaataggttgacaatccaaggctttcaagctaaaatgaacacataaattgtacatacaacttctgaggagagatcaggtctatggcaaaacaggcaaaactcaccattgaaaaggatttccaaatttctaaaatcgataagcgcatctacggctcgttcatcgagcacctcggccgtgcagtatacggcggcatctggcagccgggccaccccactgccgatgaagacggcttccgccgcgacgtactcgacctcgtgcgcgagctgcaagtgccgatcgtccgttaccccggcggcaacttcgtctccaatttctactgggaagacagcgtgggtcccgtagaagaccgcccgaagcgtcttgagcttgcatggcgcagcacagagccgaactatatcggtatcaacgagttcgcaaagtgggcgaaaaaagccgacacgcagatcatgcaggccgtcaacctcggcacacgcggcattgaagcagcgtgcaacctgctcgaatactgcaaccacccgtccggcaccaaatacagcgacctgcgcgtcaagcacggtgtcaaagacccgcacaacatcaaggtctggtgcctcggcaacgaaatggacggcccgtggcaaaccggccacaagaccgccgacgaatacggccaccttgccgatgagaccgccaaagccatgaagcagatcgatccatccatcgagctcgtgctctgcggcagctccaatacgggcatgcccacattcccggagtgggaaaacaccgcgctttcctgggcgtatgacagtgtcgattacatctctctgcaccagtactacggaaaccgcttcaacgataccgcaaacttcctcgcccagagcgacgacatggatcacttcatccgtaccgtcatcgccacgtgcgatttcgtcaaggcgaagaagcgcgcaaagaaaaacatcaacctcagcttcgacgaatggaacgtctggttccacgccgatgcctccgatgccgacaccatgaagaaccgcccgtggcagatcgcgccgcacctgctcgaagaccactacgattttgaagacgccctgctcgtcggcctcatgctcatcacgctgatgaagcactccgaccgcgtaaaaatggcgtgcatggcacagctcgtcaacgttatcgcacccattatgaccgaagaaaacggccccgcatggtgccagacgatttattatccgctgctccacgcctccaaatacggccgcggcattgcgctccagccggtgctcacctccacaaagcacgataccatcgatttcaccgatgtcaccgacgtcgagtccatcgccgtgtggaacgacgaaaaggacgaagttaccgtcttcgccgtcaaccgcagcctgacggatgacatcgtcctcgaccttgacctgcgctccttcggcgattaccgcctcgcagagcacatcgtccttgaaaacccggatatgaaggccgtcaacaccgccgagcacagcgccgtcaccccgaagctccatacggacagaaccgaaaaagacggcaatctctataaagcgaaccttacgaaaacctcgtggaatgttttgagattcgtgaagtaaaccgagcttccgaaaagtgtagttaaaagtttcgcccgccttttcaaagacggcgagttctcagaaataaagcagcgccgcaccctcgttttcctcatcgagcgtgcggcgttattttatgcgtactaacctctctgcctcaaccgatactcccttggtgtcacgccgtacatttccgaaaacgccctgtaaaaatagctcgtgttctcataccccaccgccatgataatatcgctcacggaaagcttcgtgccggaaagcagcgccgccgctttctccattcgcttgcgccgcaaaagcgatttaaacgtgaaccccgtcgtgctgtgtaccgccgcgctgaggtacgaaatcgtcacaccgtacttttccgcaatgtccgtcaagctcgccgtgcggtaattttcttcaatctcccgcagcgccgtcatcacaagtgcgctgtgatcgccctcgttttcgctcgccgccagcttatccgtgcagttcaaaagctccaaaaacagcagcgccatcgtgttctgcgtaatgcgtctgcggtttttcgtgtcgttcacaagcgtccaaacgaggttttcaacgagattctgcaccggcagcacatccgcaactctaaacagtaaaaaatccgagccccccgcgcggctgatgctgttcgcgatgaaccgcccaagcgcgttgtccgcgccgatgcgctccagcgccgtatcaaagaactgcggcagcacaataaaattcaccgcaatgtcctcatattccgcacgttctatctcatgcgaagcgccgcgccccaaaaacagcagctcgcccgcatgtacggtgatgggctcgccgccgttgatgcggtgcaccgtcttgccggagcacatgtacatgatttcaatatagctgtgcgcgtgtctggggaacggtgcaaaccgcgtgtgcgcgcgcacggagatgagccgcccgcgctccaaaagcttctcgctgtccaccgtaaacaccgcccgcgccgtgtacgccgccttgtccaccgcgccgccgtccaaaatgcgctgttcctccggcgtgatgacccgtagcctgcgcatgagttcctcggtcatttagaggatcagctcgctttcgtagtatttttcctgaaaatcgagaattttcaggatttcctccgccgtgtaaacgccggtcttttccgccgccacccacttgtcttccacgtcgttaaagcgatgcaccactgcgatcaccacgccgtcaaaggttttaaacggctccgtcggacccaaaatgtacacgtcctgctcggcgttatcccccgccatcacgcccggcacatagccgtagttcacggggtagatcatctccgggtagcgcgggtgcgcagagccaagcggcctgtccgtcacgcagtgtacgggctttccgagcacatttttgtaatcctcccgcgtcctgtgcagcgcatttaggcgcgcatcttctttttcccgccacgcttcgcgggtaagcttctctccgtccaccgtaatctctttcacgccgttgttttcaaaaaacatcaccgcagcgctttccaccgcttccgcacgctcggtggaaaattcaccgaagtccgtcacaacttccgccgtatcacccttttcggtgcagatcaccgtgccgtattcgtttttatatttcttgtgtaccgcgcgccagccgttcgccaaaggcatcatcaaaagcgtcggtgtctttttctccttaaaaatcatgcgttttcctcgctaaaattcaagatgagctccaccgggcaatggtcgctgcccatcacgtcggagaggatcttgctgtccgccaaattctttttcagctcctccgtgatgaggaaatagtcaatgcgccagccgacgttcttttctcttgccttgcccatatacgaccaccaggaatacgcgtcctttgcatcggggtacaattcgcggaacgaatccacaaaacccgccgcgagcagttcggaaaacttccctctttcttcgtacgaaaatcccgcgctgccgatgttcggctttgcgtttttgatgtcgatgcgcctgtgtgccacattcatgtcaccgcacacaataaccggcttcgtttcgtgcagcctttcgagatacgcgcggaacttatcctcaaacgccatgcgaaaatcaatgcgcacaagctctttttgagcgttcggcgtgtacacggtcacaaggtaaaactccgggaattccgcgcagatcacgcgcccctcgcagtcaaactgttcgtcgccgatgccatacgtcacattaagcggctccgtttttgtaaagattgccgtgccggcgtacccttttttctcggcagagttccaaaattccgtgtaccccgcaaaatcaaaatccgcctgctcgcgctgcattttcgtttcctgcaagcagataacatccgggtcttccgccgctaaaaagtcattaaagccctttgtcatgcaggcgcgcaacccgtttacgttccaagaaatcaacttcaaagcaaaatcacttccaatttcaaattaaatatggtatactgaattttacgaacggtctttcttcccgaaagacctctatgaaaggagttattcggtatgcagaatcctattgttactttcgagaccacccgcggcaccatcaaggcggagctttaccccgagattgcgccgaacacggtcaacaactttatttccctcattcagaagggcttttatgacggcaccatcttccaccgcgtcatccctggcttcatgatccagggcggcgacccggaaggcaccggcatgggcggccccggctacggcatcaagggtgagttcgctatgaacggcttcaagaacgatctgaagcacaccaccggcgttctctccatggcaagaagccagcgcccgaacagcgcaggcagccagttcttcatcatggtcaatgacgccccccatctcgacggccagtatgccgcattcggcaaggtcaccgagggcatcgatgtcgcacaggccatcgtttcctccccgcgcgattggtccgaccgaccgcgcgaagatcaggtcatgacgaaagtcaccgtcgagaccttcggcgttgattacgacgagcccgtcaccggccccgagcgcggctgattttaaccgcaaacgttaaaaccgaacacacagaaaccgtaccttttcaggtgcggttttttgttttactctacccttgccagtacaagcgagcattcttctgttttctcgtcgccgtagcggaacgccccgtgcagcacgctttccgcgtcgcggcacttttctgcgctcgcaccgtacagctcggcgatcacctcgcctttttgtactgcgtcgcccaccgtctttttcagcacgatgcccgcgccgtagtcgagcacatcgtcggccttctcgcgtccggcgccgagccgcacgcttgccatgcccacctgctccgcgttgatatgcaccacatacccgctgcgcggcgcgcacacgtcttttttcaccggcgaaagcgcaaaccgctcgggttctctcaagtaccgcacatccgcgccctgcgcctcggccatttcgcagaatttctcaaacgctttgcccgtctccagtgccgttttcgctttcttccgcgcgtgttcaaggctctccgcctgctcgccgagccagatcatgtttgccgcaagctccaaacactcttccgtaaggtcttccggcccgcgtccgtgcagcgtctccaaaacttccagcacctccaaggtgttgcccacggcgtgcccaagcggcctgtccatatcggtgatgagcgccgctgcgcgcctgccggaaagcttcgcgatctccaccatttcctcggcgagcgtaatcgcgtcctccgttgtcttcataaaggcgccgctgcccgtcttcacgtccagcaaaatacgctctgcgccggaggcgatcttcttgctcatgatgctcgaagcgatgagcggcacgctctccaccgtcccggtcacgtcgcgcagcgcgtaaagcttcttgtccgccgggcacagctcgcccgtctgtccgatcatcgcgcacccgatcttattgatctgcgctgtaaattcttccggagaaagatcgatccgcataccgggaatgctctcaagcttatccgtcgtgccgcccgtgtgtccaagcccgcggccgctcatcttggcaatcttcaccccgcacgccgcgcaaacaggcacaataaccatgctcgtcttgtcacccacgccgcccgtggaatgcttatctaccgtcacgccgtgtatcgcggaaaggtcggccatgtcgccggaatgcgccatcgccaaggtcagctccgccgtctcctcgtgcgtcatgccgtttaaataaatcgccatcaaaagcgccgaaagctgatagtccgggatactcccgtctgtgcacccgcgcacaaaatattcaatctcgtcctttgtcagcgtcccgccgtcccgctttttgcggataatgtccaaaatatgcagcacaaaaatcaccgccttttttaccgcttcgctttttcgcccagaacgtctctcggcgaaaagctctgcggcagcaaatcctttaatgtataaaccttttcttcaccgggctttgcaagaatgagcacaaacgcgtccccgcaaaactcccgcatcacctgcctgcacacgccgcacggcgcgcagaagtcttcgggctcctcgcccgccttgccgcccgcgattgcaacagcgacgaaatctcgctcgccctttgcaatcgccgtgaaaaacgccgtgcgctccgcacagttcgtcggcgtaaacgcagcgttttcaatgttcacgcccgtgtatatttcaccgcttttcgcaagcagcgccgcgcccaccgcaaagccggagtacgggcagtacgcctttttccgcacatcaagcgccgcttccgaaagcttttttatgacctcacttgtcatgtccgtccaccgcctcagaggcaaccgccagcgctacctccatcatctgcgtgaacgtcttctgtctctcttcgctcgaggtcgattcccccttcagcggcaagtcggataccgtcgtgatggaaagcgcctgcttgcccgcgcgcgccgccgtcatatacagcgccgccgtctccatttccacggccagaacgcccatttttttccattcggcggtctcattttcacagtcgccgtagaaaatatcgctcgtcaccacgttgccgacgcgataacgtaaattcttctcccgcgccgtctgcaccgctttttcaagcagttcaaagcttgccgtcggcgcaaatgtgcccggcaaacggtactggtgcgcaaagttcgagtccgtgcacgcgcccatcgccaatactaaatcgcgcagctccacgccgtccgcaatgccgcccgccgtaccgatacgaatgatcgcttccacatcgtagcaatgatacagctcgtagctgtatatgcccatagaaggcatacccatgccgctgcccattacggaaacacgcttgccgttatacaagcccgtatagcccagcattccgcgcaccgtattaaagcacacggcattttccaaaaacgtctccgcaataaatttcgccctgagcgggtcgcccggcatcaaaaccacctttgcaatatcgcccttttttgcttcgttatgcggtgtcaccaaattttcctcccgaattcaaatttcaaatcatgcaaaatgcgtttcgccgtctttataataaacttcactgcattccggcgtctcaaaaacgtgcaccaaaccctcaaagctttccaccgtccggtgctcgaaaagctcttcccgcggcagccagaacgcatcgccttcttcggagccgtgcagctcgcccgtaaatttatccgcgcggaacaaaaacacaatgtaccgcacgccgttatcaagccagaactgcttcacaccgcacagcgtcggattttcaatcgtcagcccggtctcttcacggatttcgcgaatgaccgatgccgcgatggattcccccgcttccacgtgcccgcccgggtaaacgatacccgaccagttcgggtcaagacggttctgcacgagtacgttgcccttgccgtcctccaccatgcacatgtttgtcagctccaccgtttcttttctgcccatttttctcactccccaaatagcacaatgccgcgcagaacaaaccctcatttcctgcgcggcaccgctattattagaatttacacaatgcccgcttttgtgatggtctcaagctccgcacgcgtcggcagaccctcattgtcaccccggtgcgtaatctgtatcgagccgattaccgtgccgcgcgtcgcagcctcctgcaaggacatgccctccgccacagcggagatgacgcccgccgcaaagccgtcgcccgcgccaaccgtgtccacgattcttttcaccgggaatgccggcaccgtgccgtgctcgccgcccgtggaccagtacgcgcccttgtcgcccagcttcacaatcacgctgtctacgccgcgctcgtggtaaaactccgcaatgccctccggcgtgtcacgctttgtgagaattttgccctcactaaggcccggcaaaacgaggtctgcttcctgtgcgaggctgttcagcgtgcgcaccatctctttttcgtccttccaaagctgcgggcgcaggttcgggtcaaacgaaataaacatatccagcgccttcgcgcggctcatcaatcgtttcaccgcgtccaatgccgacttcgacaccgccggaaaaatacccgtcacgtgcagaaaatcacatccgtataagtcgagcttatcgatgtcatgcgtcgagatctgcgaagccgcgctgttccgtctgaaatacgcgatcttcgggtcgcccgcctcggttctgcctttcatcataaacccggtcgaagccgtgtccgtcacggtcacaagcgcgtcggaaacgtggttgcctttcatgctctttaaaatgcgtttgcccaccgggtcgtcgccgaggcgcgtgcagtacagcgcttcatggtcaaggcgggaaagtcccaccgccacgttatattccgcaccggccacagccgccgaaaagtgtgtcacattctccagctcgccgagctcctccgcgatgaaaagccccatcggctcgccgaccagcacaatgcgcccgcgcacctcgtcctccggctcgtccgcagctttctgcagttcagcttcgtctacaaactccatcttcatagcgtttccccttttaaaccgtcgtcttcaccaccgtgcagtggccattaatcttaattttgccgctgccggccggtacaaacaggctgtccgccggcttgaactccacttcgttctcgctgccgacaaccttgccgctgccctccgtcacaacaagcgacgcaaacgaatcgcccgtcacatcaatttcgacttcgccgtccacaacatatttctccgtcgtaaagtacgggcaggaagccagcgcgcactttgtgcctccgggaatctcctccggcttgccctgcttgtcggacgtgtcgctcggggtcagcttggaaacgtcaatggccttatcaatatgcagttcacgcagcttgccgtccgcaccgcggcggccgtagtcgtacacgcggtatgtcgtgttggaattctgctgaatttcgcaaatgagaattcccgcgccgattgcgtggatcgtaccggactgaatgaagaacacgtcgcccttcttcacgtcggccttgtagagcacatccgtcagcgtgttgtcttcaatgcgctttttgaattcctcttttgtcagcgcacggttcacgccgaagtacagcgaagcacccggctcgcagtccacaacgtaccacatctcggtcttgccgtattcgccctccacgcgcagcgcatattcgtcgctcgggtgcacctgcacagaaagcggctgcttcgcatcgatgaacttgataagcaccgggaactccttaaatttcgcaccgttcacaccgagcgccttcgcaccgactttttccaaatactcgccgaatttcagcccgtcgtattcaccgccgtctatcacgctctggcccgccgggtgcgtagaaagctcccagctctccgcaaccttttcatagtcgcactttttgccgtaaacgtcgcgcagctttgtgccgccccacagatagtccttaaatgccggggataatttctcaatcttcatattcattcgttcctttcaaactgttttatatcaaaatttatcgtcttgtcgattctttctcgtgcagcggcatatcgagcacaagcggctgctccgggtcgctgctgcgcagcatgtggatgagcttattcgccgcggctctgcccatctccaccttcgggtgcacaaaagaggtaatcttcaccggcgagtattccgaaatgctcgaatcgtcaaacccgatgacgagaacatcctcgggcacgcgcacattgtgcttctgtaagaggtcaatcaccccatacgcaatctggtcgttgtagcacacaatgccgtcacacccgcgcaggcgctcaaacatgtagtcgctgttgtcggggcgaaaaagcctgctgcgctcggccgtcgtgtaccaaaccacattgtcgtcgccaaggacgcatccgttgtggataagcccctcggaaaagcccgcgtagcgcccgtggccctgcatgtcgtcagatttaaacacgccgccgatacgtctgcatcccttttcaatcaagaggtcgaccgcctgcaagccggccttgcggtcgtccgtcaccacgtaaacggaatcgggtaaatcgcggtaatagctgttgaaaaacaccaccggcacacccattttttcaagcctgcggtaaagctccacgttcgggttcgggaacgccgtcttcgtgccctccacaatcactccgtccacgcggcgggagatgagcgactgcaaaatgcgcgcttcctcctccacgtggttgttcgtcacattcagggtcaaatcatagcccgcgttcgtcagcgtctcctcaatgccgcggatgatcgtcggaaaaatatagtcggaaatatacgtcgtcacaatggcgatgctgttgccgcgcggcgtgcgtcggctctcggagctgatatacgtgccgctgccgcgtctgcgttcaatgagcccctcctgctcgaggacggaaagcgcctgccgcacggtctggcggctgtacccgaactgatcggaaagcgtgttttcagattccatgcgttcgccgggctcatattcgccgtttttgatcttctccttgatggtatccaccagaaagcgatatttcgcagttttcttttctgtgtctgccatgtcatcgttcctttcaaaaaggatacctgtttgcacaggttcaatacaaccttattataaaaagccgtacaactttttgcaatacctttcgcaaaatttgtacggacttattttcaagatattttgcaaaagcaccggaaagtacgaaaattttgaggaaaaacgccgccgcacagcccaaaaagccatgcagcggcaaacattccatttcttcactttcagccgagcatcgcattgatttccgcaagcacacgctcatacgcttcgttcagctttgcggcttcctcttccgtgccgtccagcttcgccgtttcgtactcttcaagcagctccgcagcatcctgctgcaagcggtcaagcgtatctgcgctcacagcgttttcgatctccgtctcgacttcctgctgttccgtcaagccctgcgcccaatccgtcttggtgtccgcttctgtctgacgcactgcggtagcattcatggcatccgggtcggtcacgttcgcctccgttttcggcggcacagcacacgcggtcagcaatcccatcagtaaaacaagtaaaattacaacggttcttttcatagcaaattctcccttcctcattgtaccggaatcgcttatattaaaaccatcggactcaactcctttatttaactaaagtatactgtattcaagtctttttgtcaataattttacacagattcattcgtataatccctgcatttttgtacttttagtctttgcctctcattcgtactttttccctctgttcagcataaaaaggcggcattgccgcctttcgggagaccccctaattgggtctcccacgtgcaaacagtccactgggctgtttgcacgcaactacacagaaaaaccgccgtgcggaaaagctcccacacggcggctctgatttatcaaaattttgcccgtcttattccacggtcaggtcaaacttaaacgtgaacgtctcgtcgtcaaactgcatcgccttcgcaaggcgcggaccgcagctgttggagcctacgccgctcatcttgcagtcgaagcagaacacattgtcggggctttccgtaagctcgtaattgtgcatcttctccgtcatttcctcctgcgtatagtgcgaaaggttgaacgagaagtcctccggactcgtcacggtcacagcgcccgcgccgtccgtgatcgtcacccgcgcacagccgaagtggctgccgttctcctgcggcttcacgtagtcctcaaaaaggtcgtccgccgtctgcgcaaagtgacccagcgaagacgcatggtgcttgtcgcagtacgattcatacgggccgtagccgtaatattccgccgtgtcaaacgacttcggcaggaacattctaaggccgaatctcggcaggaacggacgctccatgtcgcgcttaccgttgatctccgctcttaccttgccctcggcgtccaccgtaaagcggcagtcaaggtgcaggaacggtctgcggtacaccgccgcaaggctcagcttgcaatcgatcacaacaacgccgtcttcctctttcgcgttgcaggcatagacttttatcgcgggttcgttgtagccggcctgctcccattccttgcgcacaaactggtcgttgtccgtcggtgcacgccacacattccacgtcatcgggcgggtcatgatgttcacattgttcttcaccatagacgtaaacacgccctcggtcttcgagaacacataacggaagctgtcgcccgtcaccgtcacggcgcggctgtcctcctccgcaacaacaaagccctttctaagcgcttcttccttgcgtgccccgcgggaaacgatcagctggtcaaagccgagcgggtgtcccttctcaaagaacacgctgtcgttcttcttcgcgctgtactgcagaagcaccgccacgtcgccctccgtcggaattgcatccggcagcgtaatgacaccgctttcgtgcggggcaatcttgatgtcgtccatcacgccgcaggccaccgtatcgccgtcctgctgaatttcccaggaaagcgtcaaaaattcttccgtgttcgtaaaatcgcggtaattcgtcagctgaatttcccccgtttcgcggttcacaagcgccgcgcgcaccgggcgaatgacgtttttatattcgagtaaacccgtatgcggtgtacggtcggggtacacaaggccgtccatgcagaagttgccgtcgtgcggatattcgccaaaatcgccgccgtagcggaaaatatcgcggttgtcgggcgtcgtaccgccgtaaacggcgtggtcgcaccattcccaaacaaagccgcccataaagcggtcatacttcatgataagctgctggtactgctccgcatctccggggccgttacccatcgcgtggatgtactcgcaaagcaccaagggcttcgtgtacttcgggtcgaccatatattcatcaatccactccggcgccgagtacatgcggctctccgtcgtcagggaagacaggtcgttcttgtggccgcgcgcatcgtaatacgtgttctcgtagtgcgtcaagcgggacgggtcatattcgcgcacccatgcgccggccttctcaaagctcgggccccagccggtctcattgccgtaagaccacatcagcacgcacgcgttattcttgtcgcggatgacgctgcgctgaattctgtccataatcgccttgtcgaaaatcgggttcagtgcattgtccgcgtattcgtccatgccgtagccgccggtctgcgccgccgcaccgtggccctcaatgtccgcctcggcaataacatagaagccgtattcgctgcaaagctgtaagaaccacggcgcgttcgggtagtggcttgtgcgcactgcgttgatgttatgctgcttcatcaggaacaggtcgcgcttcgcctgctcgcggctgatggtgtagcccgtcaccgggtcgctgtcatggcggttcacgccgcgcaatttgattttcacattgttgaaatacagaacgctgtcgcggatctcaattttggagatgcccaccttctgctcgatcacttcatccgccgtgcggaacacgatcgtgtactggtacgggtcctcggcattccaaagatgcgggttttcgagcgcaaagttcggctccgcgcccgccgtgctttcgagcagagcgccctcggcgtcatacagctccgccgtcacgtccggcagcccgataaagtccatctccacgcggatatccgcatgggaaaggtcatcgctcaccgtcgtctttacaaagtaatcgcggatgtgcgccaaaggtctgcgaatgaggtacacgtcacggaaaataccgctcatgcgcagcttatcctggtcctccaggtacgagccgtcacaccactttacaaccagcaccgccacggagttttcaccctcgttcagtaaatcggtgatgtcaaactcgctcgtcgagtgcgaaacctggctgtaccctgcaaactgctcgttgatccacagatagaagcaggagtccacgccctcaaagttcaaataaattttctgcgtcaggtcttccgcgttcatgtagaagcggcgcagataaagaccgcaggggttctcgtccggcacatacggcgggtcatacgggaacggatagcgcacgttcgtgtactggtggcggtcatagcccgcattttgccagcaggacggcacctcaatctcgtccatatcctcctcgtcaaagcagatctcaccctcggagccctccgggaacacgtctaaaaacgagtcaaaataccgaaacgaccatgtgccgttcaaaaggcacactcttgtggattcttccccgtcctccggtgcctttggcaagaagtagctgcggttttggcaggtacccacgtgcagcacgtccggattttcgtgcattttctgaaattccattatcaataccgttcctttcctgcgtgaaaacgttttccacgcgtgtgttgaaacactccaaaattcagttgaagcgatttagaacctatgctataatgagcgtacacagatggggattttccgcatcccctctgctacaagattacatgaaaaaaaggtgcgggtcaagcccgtaaccaaataaattttgagaaaggaacaaaaaccatgacgatacaaattctgctcgccgccctgttccttgcggcagtgctgtggctcggctttcgtgccgcgccggaaacggagggcgcccccgtccgccgcgcccgtataaaggaagctacggtcttcggcctgccccccgtacccgtcttctgcgccgtgctcgctttagggcttatcctgcgctttattctgggctacaacatcaacgggttcgaggccgacatctcctgctttaaagcgtgggccgcctatacgcacgattacggctttaataacatgtattaccgggacttcttcctcgattatccccccggctatctctacgtgctctacatcatcgaggcgttccgccgcctgttcggtgtcgatcaatacgcgcagagctatacgctcatgataaagctcgcgcccattttgtcggacatcgcctgcgccgcggcactttgggtacttgcccgcaaaaagctcggtgaaaaaagcgcactccttattgcgtttgcctatcttttctgccccgccgtcatcgtcaattcctccgtctggggtcaggccgatagcttctgcgcgcttctgctcctctgcacactgctgcttctctggtacaaccacacgccgctcgccgcgttcgtctacggcttcggcatcttaagtaagccgcagatgctcattttcgcaccggtgctcattttctgggtcatccgcaaaaaggactggaaaaacctcgtcctcgggcccatcatcgcccttgtgacgattctcctgttctccacaccgtttataaagaatttcgattacctgaagctcatcgaaatctacaccggcaccatcgattattataattactacaccatcaacgcctataacgtctgggcactcttcgggctcaactgggctgccctgccggaacacagcacttggctgcaattcggcgtgccgctcgcaaccgtcctcgcaggcctcttactgctgaaatcgaagcgcgacgacgccgttttcgcctgccccaccgttttgatgttcacggtctacattttctgcgtcaaaatgcacgagcgttatctgttccccgtgctcctgtgcctgctgctcacctacgttttcacaaaggaaaagcgcttcctgctcctgttcgcgggcacatccacggtgcattttttgaacgttgcctatgtgttgtacctcaataacgcctacatttcccccacgtccattcaaatcctgttcctctccgcgctgcatgtgctcctgtacatttatatgctctatatcacgtaccgctgctttatttccgaaaaagccctgcgcccgctccctgcgtttaaaacgcagaaagccgcctcggccgagcagcacacaaagcccgccgcagcgcccgaattctccctcatcaccgacaagaatcataacgtccgcctgacgcgtgtcgatcttctctgcatcgccgtcgttaccctcctttacggcatcgtcgcgttcacgaatctcggtgatcacgagaccgccaataccacatggacgcctcaaaacggcaaatccgccgtctttgagaccgacgacgcgtacagcgaaattttctacctgcccggcatcgcccctgcggataacggcatcggccagcgcgtcggcaccaatatgaagattgaggtttcaaacaatcaaaccaactggacgaccgccgccgaaaacacggacggcagcgtctatgcgtggaaaaacgtctccgtcgccgccgtcggcaaatatatccgcatcacatcgatgtgcgacgacctcgccatcaacgagttcgcgctcaaaaagacagacggcaccggctttgcaacgctcaccgccgtctccggcaacgcgtggcagctcacggatgagcaaaacaccgtcccgctttatccaagctacatgaactccacctatttcgacgaaatctaccacgcccgcaccgcctacgagcacattttgggactcgagccatacgaaaacacgcaccccacgctcggcaagctcatcatctcggtcggcattcgcatcttcggcatgaacccgttcggctggcgcttcatgggcacgctgttcggtgttctgatgctccctgcgctctaccatttcttaaagcgcctctttggctccacgttcctctgcaccgccggtaccgtcctctttgcgttcgatttcatgcactacgtccaaacacgcatcgcgaccatcgatacctacgccgtgttcttcatcattttaatgtacgacgccatgctcgtgtttattcagcacgatttaaaaaccgacagcttcaaaaagctcctgcccccgctgcttttaagcggcatcttcatggggctcggcatcgcaagcaagtggacggtcgcctatggcgcagtcggtctcgccgtgctgttcttcggcaagctcatcgtctcttaccgcgaagagaaaggccacgccgccgtgcagaaagcgctccttaataaatccataaagctctgcctctggtgctgcctgctgttcatcgccattccgttcggcatctactttacggcgttcctgccgctcaccacattgccgcataaccgctacgatgttttcggccggttcatcgcgtaccaaacgcatatgtataattaccactccacgctgcaggcgacccatccgtttgagtccccgtggtatcaatggccgttcgacatccgcaacgtatggtactacggcaattacagcgccgacagcgagggccacatccgcaccatttcggtgctcggcaacccgctgttcttctgggcgtgcgtgcccgccaccgtgtacgcgttcgtaagggccgtaaaacggcactcccgtaccgcgctcatctgtgtcatcggcttcttgtccgcgtatctgccgtgggtactcgtgccgcgctgcacgttcatttaccactatttcactgccgtgccgtttattctcatcgcgctcctcatcgcgtatcagcgccttgaagaaacagcttccctgcgccgcgtcgtcttcacaaaaggcgccgtcacgctcacagtcggcagaattctcctgcttgcctgcgtcctcgtgcacattcttatgttcatcgcgttctaccccgtgctcaccggtaccctcaccacgcagaactacgccaacgctttagaatggctccccagctggttttttatctaacgtaaaccacagtatatataaaaagggcggcacaaagccgcccttcaagaacccccttgatagggtttcttacgaagaaccgtcccccggacggttcttctattttcctgatcttgcgtttggcaaaagtatttcgagctctgcggagctcgaccaaaggccttgcctttggaatccacgaccttttgaaaaaggtcgtcgaaaactttatttgcccgctctatttcagctcacttaccccttcaccgactccgtcgccgccgcactgttcaccggcttatcgaggttcttaatctccttgttgtagagaattacaaagaatacaaccgtcacaatgagcgaaataaattcggagattgggaagcagaaccacacagcgccgaggctgattttcgagagcagccacgccgccggcaccagcacaaccagctgacgcatcacagactgcacaaggctgtacatgccgtggcccgtcgcctgaaacagcgtcgaaagcgcaatgccgatcgccgccatcgggaagtggatcgcgatgattctaagcgccgagtcgccgatctcgtgcagctccggcgtcgcgttgaagatggaaatcagcgtgcccgggcagatttcaaacacgataagacccgcaatctcaataataagcgcaatcacgcagccgatcttcaccgcacccgtcacacgcttcttgtcgcgcgcaccgtagttgtagcccataatcggcatgagcccctgcgtcaagccgaacaccggcataaacacaaaggactgcaatttaaagtaaacaccgaacacattcacggccactgcggaaaatcctgccaaaatgccgttcattgccatggtcatcagcgtgccgatggcgttcatcacgatgctcggcagacccacaacgtaaatgtccttcatcgtcttgccgtggaaacggaagcccttaaattccagcgcaatcgcgtggttgccgaaaaacaaaatgcaaaggcccacaatcatcgaaaggatctggccgccaaccgtcgcatacgccgcaccggccacgcccatgttgaagttgaaaatgagaatcgggtcaaagatgatgtttgccaccgcgcccacaagctgaatgatcatcggcatcaccatgttgcccgtcgcctgtaacattttttcaatgaccgccgcaaagaagaagccgaacgatgctaccgtcacaatcgtgatgtatgtcgtgcccatgctgagcacttccgcgtcctgcgtgtaaagcgccgtaaacggacgcgccacaatcgcaccgaaaaccgcaaagaccacatacgtgatcgcggaaagaataatgccgtgcgtcgccgcgttgtccgccgcctcctggtcgcgctcgccgagtctgcgggaaatgagtgagctcacgcccacgccggtgcccacgccgaatgccaccaacaggttctgaatcgggaatgccagcgagaccgccgtcagtgcattctggctcacctgcgccacaaagtagctgtccacaatgttgtaaagcgcctgaatcagcatcgagaacattgccggcagtgccatcgtcaaaatcagcggcagcatcttcgcagagcccatgcggttgtttgccgggtcctcaagctttaccgttttttccgccataaaatcaaacttcctttcttttttgtaaattcttttgcaaatctctacgctccaaacgcggttttttcgcatgaaaagacttcgccgcaagcacggcgaagtacgctgtttaaagcctttagttttcattctgtccgaccgttatcctgttcaacagtctaaaatcgaactgatacagtataacacactttatttttcaccgcaacacttcgcataaaaacgcgcattttcaccaattccgcgctccaaaacaagccctatcgtcacagaatattcaccttttgttcttgcattcgacgcaataaatcggtacaataaatacaaactggtcatactctgcacaaacaggggatttccgggaggaaacggggtcgcttttcgccccgcaatattgaaataaggaaggtagaaatttatggcatccggcaaaatcatgatcgtagacgacgatagaaatatctgtgagcttttaagattgtatattgaaaaggaaggctttgaaacagccattgcaaacgacggcaaggcggccgtgcaaatgtttgattccgtcaacccggacctcatgctgctcgatatcatgctcccggagctcgacggctggcaggtctgccgcgagatccgcaaaaagtcccagtgccccatcattatgctgacggctaagggcgaagtgttcgataaagtcctcggcttagagctcggcgcggacgattatgtcgtaaagcccttcgagacaaaagaggtcatcgcgcgcatcaacgccgtcctccgccgcattggcaaaaaagaatcctctcaggtgaaagaagttcactacgagaatctctccatcaatctcacaaattacgaactcaaggtcaagggcgtccagattgacactccgccgaaggaaatggagctcatctatcatctcgcctcaaacccgaaccgcgtcttcacgcgtgaccagctcctcgacgaagtgtggggctttgattattacggcgattcccgcaccgtagacgtgcacgttaagcgcctgcgtgaaaaactcgaaggcgtttccgataaatggtcgcttaaaaccgtctggggcgtcggctataagtttgaagtgaaagaataagccggcgaaaggaaggattccccttgcaaaaatccctgttcggaaaatacctgcgcgtcaccatggtcatcgtgctcgccagcttcatcgtgctcggcagcgtcatgatgtttgtgttctcgcagtacaccaaaagcgataagcgcaaactgcttatgcaaaacgcctcgtccatggcgtccattacttccgtcgtagacatcacgaataacggtgcaccggagcttctgaaagtctttgtgcgcacgttctctctcaatatcgatgccgatattttcgtcaccgatctcgagggcaacgtcctgttcggcgcctatgccaacagcacctcaaatatcggcgcaaatttcatcccgcagacgaagatttcggcagacatcgtaaagtgcgcgtccgagggctcctataccggtgacggacgcaaaaacggcatttacgataccccgtactacgtcgtcggcgtgccgctttattccgtcgccgaaacatcatcttccgaggcaggaggcgaaaacagcaccagagtgcccgtcggtgccgtttttgccgccatgaacgctgcctccctcacggagtatcagttcgccgcactgcaaatgttcctcatcgccgcagccgccgcgttcattctggcgttcgttgtcgtcggcctcttctcctaccggctcgtcaagcccctgcggcagatgtccgccgcagccaaaagcttcggcgacggtgatttctccatccgcgtgcccgtcacaagcaacgatgagattggccagcttgccaccgcgttcaacaacatggcagattcgctctccggcagcgaaagcatgaaccgcagcttcgtcgcgaacgtctcgcacgagttaaagaccccgatgacaaccatcgcgggcttcatcgacggcattctggacggcaccattccgccggagcgccagtcgcattacctgcacatcgtctccgacgaggtcaagcgcctctcgcgtcttgtccgcactatgttaaatctctcccgcatcgataacggcgagctgaagctccgcccaaacgatttcgatatttccgagaccgtcctctccaccgtgctcacgtttgaaaagagcatcgacgagaaaaagatcgacatccgcgggctcgataccttgcagcccatgcaggtgcacggcgatgaagacctcttgcatcaggtcgtctataaccttgtcgaaaacgccgtcaagttcacaaacaccgagggctacatctccttcaacgtctcggacagcatcgaccgcatcgtcgtcaccatcgaaaacagcggctccggcatccagtccgatgagctccccctcgtgttcgagaaattttataagaccgataaatcgagaagtcaggataaaaacggcatgggtctcggcctgtaccttgtccgcaccatcatcaagctccacggcggcgacatttccgtctcctccgtcgtgaacgagtacacccgcttctcgttctatattccgaagccacaggaacccccgaagctgaagtacaataccggctccatcccggtcaccgtgccggtcgaagatgccgtcatctcggagcgccccaaaaaggagcaccacggccacaaggataataaagagcccgatcagaaataaatccaaaagtgaggtatcacaccatggacgattttgaaaacaaaaccccggaaatgcaggagcctgcttcttccgaagacaatatccccgaaacaccggaaaccgcggagaccattcccgcagagcccaccgtttctgatgaaccggccgctcccgcagaaccgactgtcaccccagagccgaccgtttccgatgcccccacggcagagccgctcccgaatgccgagcaggcgccggaagcccagcccatcccgaacgtgaacattccgccgcagccgcagtccgttcagcataccggctattatcccccgcagccgccgtatcagccctatccgtacaacacgcagccaaacgccccgcagtacggtaacccgccgtatggctatgcaaactacaacacccagccgcagccggggcagtacccgccgccctacggacagggtgcttatcccccgccgtacccgcagaatatgcaaaatccgtatccgcatcccgcgccgcaaaaaaggaaaatgccgctcgggttgcgcatcctcatcatcgtcatgtccgtcctcgtcgcaggctccgtcatcggctttgcttcctacggcatctacgccgccgtgaaccgcggttacggcgtcacaacgctgccgggcgatccactcatcccgaacttcccgcatgaaaacgacggcagcgacagcgaaacgcccggcgaagacgaaacgcccgatacggacgataacttcaccccgccggacatcgccgtcaccccgaatacggagggcatcaccttagataaagagccgaataccgccgagctcgatatcgatgccgtgtacgataaggtcatcccgtccaccgtgcttgtcatcacgcagagcggcgaaacgcagggcacaggcaccggcatttttgcaacggaagatggctacatcatcacgaacagccatgtcattttaaattccaaatccgtttccgtacaggtcaaaacgtatgacggtgaacttcatgacgccgtcgtcgtcgggttcgataaaaccaccgacctcgccgtgctcaaaatcgacggcacaggctacatgcccgccgagttcggtgacagcgatgacctgcgcatgggccagtgggtcgtcgccatcggcaacccgggcggcgagcagttctccggctccatcacgcgcggcgtcatctcgggtcttaaccgttccgtcggctcgtacagctcgaacggcatgacgtatatccaaaccgacgccgccatcaatcccggcaattccggcggcccgctcgtcaacttacacggtcaggtcatcggcatcagttccgctaaaatcgtctccgagcagtacgagggcatgggcttcgccatcccgatcaccggtgcaaagagcatcatagacgacctgcttgcaggcggctatgtgcagggccgcgtccgcttcggcatcaaaggcaccgccatcacccagatgcaggccgccatgtatgacgtcccgcagggcttcatgatcagcgagatcgacgaagacagctgctttaacggcacagacgtgcaggcgtatgacatcatcaccgccatcgatgataccgaaacgaaatcgcttgaagagctcgcaaacgcacttttaaattataagcccggcgataccgccgagatccacctgttccgcccgaacgagagcggcgtaggcggcgaagaattcaccgtcaccgtcaccctgctcgaagataaaggcgaaacgcaaggctagcacctgcctgcggcaagcgaatgaataaagtctttagtcaagttttcttcgagaaaacttgcgaattccaaaggcagcgcctttggtcgtcgtccgcagacgacgaaacaccttttgcctcccaaaaatcaggacgggagaacaaacagtccggtggactgtttgttcgtgggagacccaattagggggtctcccaatgaatttgcgcggcaaattcataaaaaccgcctttagaaatccctgaaaattgcacacaatacgccaagaagcgcgcagctcctccaaaagctgcgcgcttcttttttaatgatatatctctctttgttcgatatgatattttcctcgcggaaaatgatataacgccttatctgaacgccaacaccgcgtacgttacgccgctttcgttcagcgatgccataccgctgccgtccgtcggggcggtttgggtctggtgcaccttcacctgcgccgtggaaagcgtcacgccaaggctgttctggccgcctgccgctatgccggcgtattgctttgtgcagcccgtcgtcgcctgcgaaaacggcttgcccaccgcaaaaacgatcaccgcactcggactgaagccgaataagatcgtgcgcgaggccgcacccgtgcccgtgtacgtgcgcacctccgtcggcgtatctaaacgctttctgcgcgtgtcatttaaatgcaggttatcgttttgaatgtgcccgccaagctgcgactctatggcttcgttgtccgccacaaaatccacacggcgcggcttgtccgtcccctcccaaaggcaaaggccgagaaccgttgattttttacttgctgccatgtttctcctttccgctcataaaacgtcgagcgcgttccaagtcttgtttcgaaggtcgagcacattccacgagctccccgccgcgtcctgtgcgtcccacgtgtttttgccgaaatcgaacaccaaactgaggtgcgcaggcaaaaacacgcgcgcttcgctttccgccgccgcttcggaaatgcccatggtagagagcacatttatgttcagcacgccgcccttttgcgggacgagcttcccgttgatacctgccgccaaaagctgcttttgcatcgcttccactgtgtggtctgcgggggttaccgcgccgcgggtcagcagcatcgcgcgccggtttttcgtgctgtccacggatggcaccacgcggaacagcgattcaaacgctttcagcccgtcctcctccgccgtctgcacaaacgcgtcgcgccgcacatgagaaagcgtatcatacacgagttcaagcccctttgcatacgccgcaagctctgccgaaagccacttgtcttcgccaaaatacagccccgttttttcgagcatcgcgcgcatgcgggtttccagttccgtcatttgccctccttactgcgtctccagcacatttacagcgcccgccgtgacgatctccccggcgttcggcgtaaagtccgccacgctcgccggcaccgtgcagttttgtgctacgcccgtctccatcaccgcatggattagccccgccgtcacaaacggctcgcccacctcaaacgcattcaggtacgccgtgattgccgccgtgcacgatgctttcgcatcttcaaacgcgcacccgtccttcggcttcacgtaaactgtcaccggctttttcacagccaccgctgcagccaccgtcacgtccacactgatctccttgagcttttcgagcgtctctccgacttttccgagcacctcgtccgtcaccgcgccgttgtcgccgtacaggtacaccgccaccgtgttcacaccgtttgcgcgcggcaccacctgaacgcttttcacgcccggtgtcatcagcgccgcacggcggtacgtctccgtgttcgagccgttcggcagtgcgtaaaagcaccgcaaaaggcgcgtgcgcagcgcttcgtcgtcctctttatccgcgccgcccgtaaacgacacatcgttcgtcacgctttcaatgcccgccggcggcgtgatgagcgtgttcaccgcaccctttgccgcgttgccgcgcctgccgcccaaaaccgcctgcgccgccgctgtcaccgtcagtgcgcctgcgggcagcacagccgcctccgtcgtctcatattccaccgcgttttcgccgcttgccgcacacaccgtgcccgcggggatctccgccgcgtagctcagcgccgttcggcgcgaaaacgtcagcgtgcccacagatttcaccgcgtccttgcgcacaagcccgcgctcttcggcgtgcaggtcaagcgcctcgcccgccgccgtctgcggaaagcaattcagcttcagcgattccgccgcgcacagcaccgtatacagctcgcccgccagtaccttcagacggatcgaaacgtccgccgcgtcctcgagctccacgcccgcctgcgttttgtattccgccgccatgcgcgcataaatttcctcaaatttcacactttcgcccctttcaccgcaatctcccccgtgccgagcatcgtctggagtccgaagataaaccgctccccctcgcgccgcacggagaccgcctcaacaccggctaagggcaacagcgccgcctgcgcataccgcagcgcccgctcctcggcgtgctcgtccgctgcatccagcatataaaaccggctgccgagcacgcggtcatagcaaaacgcgccgcgttttaagcaaatgcggttatacgcgcgctgtataagcgcgttaagcccctcggccgtcttcggcagccctgtcgccgccgtctgcgttatgccgtttaaaatcacgacctccacgctattcctcctttttctcaaacacctgcccattgatgacgaccgtgccgtcgagcttcaaaacgatctccgcaccgcccgctgagaacagccgcacctcgccgggcaaaagcgttcccgcgtcgttcacaacgccaaggcacacaccgccggtcatcacagcctccgtaccctgcggcacgctcaccgccatgccgtacggcaccgttacagtcggtgcacggcgctccagctccgtgcagacggaaatctccccgccgcccgtcgtcacaacgcccgttttcacgctttcggccttttccgccgtctcctttttcgtcagccacatgttcatgcctcctttaaaccggttcaaaatgcagctcggtcttcacgtctttcccgcgcagcaaaacgtttttggagatgagccgcacctcgccaagctcctccgtccgcatcgtgtcccccatgttcccgtctatataagaagcacacgtcagctttaatcgctttgccgccctgcggctttcatttaaaagcgccgtcggtgctgttttcgcataggcggaaagataccgcacgcgcacctgtggggccaaaggatcgtgatattccgcgctgtatgcgcccgtctgcgcgttttgcaccgtaacgccgctcagcattttgtacgggcaaaaaatcacctcccgcgccgtcacccagtcgggcttcaccgttttcggcacgtagctttcaaagtgcacgccgccgcttttgtccgtatacggcgtacagtttagatatctctcagagaacgtttgcaacgcttcaaaacagctcacgcccttttctacggtcaaaacgccctccaccggccgcctgtcgccgcccacggcgtgcagccccagcggcatcagatacatccgctccaaaagccgcagcgagggcaatctaagctccatcggtgccgcctcgttgtcgagcaaaagcgccgcgcggctgcgcagggagaagacctccgtgcgcgcgccgttctggcatttcacgcggtgttcgtccacgataccgtcaaagagcaccgcgccgtcctttttaagcaccgcccccacgggctcttccgtaaaaagccgctttcccacactaaaccgcaccgtcaaactgtccgccaccgtatccgcgtcgcttcttaaaagccattcgttcggctccgctttaggtgagtgtttttcaccgcttgcaaacacaaactcaagcgaaaaatccgtcacggaacatgcacctcctcgccgtccttcagcgccgcaatgcacgcgatatgccggttattctccgccaagcggtcaatcgaaacgcccgtaaaatacgcgtaatcccacaggctctcgcccgccttcgcgcggtatgtccggccggagaacgcttcgcttttccccgccgtctccacaaaggcgaacgtgtacggcaccgtgtttttctccggcacgccgatgagcgcaagctcgctcaaaaccgcctcaaacggcctgtgccccggcaagtacagcgtatctgtttcaccgaaaagcgcttccaattcacagtaaaccgccatcgcattctccccggtaaagtgccccttgcccgctacgcgcgccttgcgcttgccgaccgcctccacacgttcttcgccgtcaacacccaccgtctcacgcagcagacacgcccgctcgagttttaattccgtcgggttcaccggaaacacaaagctgccaaactgcatcgtcatcaggttcatgcaaacctcctatccgcacgaagcagcgcgggatatcgccgctcctcgcgctccaaaatgccggagagcgcctgtgcgtttttgttttcttcttccaccttatgcctccgttccgctttgtgttcgctgtgtgattttttcacacgcacccgcttctatcacaagcttgttttcgctcgccgctttcaaaacgcagtgcgtgtaccgcgcgccgcctgtttgcagtgtgaattcgccggggagcgcctcctcgccgcccgaaaacccgtgcagtacgaccgtgtacaccgctttgcccgccaccgccgcatacggattttcctcgccgatggcgtaatagcgcttgaccttcgcttcgtgcgaaattttcaccgcgtccgccgtaaataccttgtcgccgattaccaccgccgcgcgtgcgttatccgccgcacccgtcgccgcctgcaccgtgcaaagcgtcacaaggcaactgagcgccgccgagtacgtcgtctcgctccgcttcacactgcgcagcgcacacggcaaagacgataccgccgcacacaccgcgtcaaacagccgcgcgtggtcgtccctttcgcgcgcatacagctgcacgccgagcaccgtttcaaacacaccgtccgcgttttcctcctgcatcacgcccaccgtcaccgcggcacgctgcggaagcctttgcagcgtgcccgtaaacgccgggcgcaccgcgcagtccggcaaaagcgctttcagcttttccgcaagcgccgcactaagctccgttcccgtcatctttttcctccttttccagcaccgcgcgcacgtaaagcgccccgcaaatcccgcttttttcctcggcatataaaacgcggaacgtctcgccgcccgcagtcagcctcgcgttctccgcgccgcaaagcactttgccgtcgccgaagtagacatacagcggcttcatcgccccgccgaacgtctccgtttccgcctgcaaggccgttttgtcttccttcaggcaatgcacaacgccgcggcaaacgaccttcacgccgcttatctccgccatcatctgctgcgccctcaaaaatacatttctcacaccgtgtcctccgtcacgccgaagtaaaaatcctcgtcacgcaaaaccccggacaccgcccgctcgcactgctttgcataggcgagcgccctttcgctgcctttgtcaaattccgcgcgcacctcgcccgccgtcaggcttttcggcgatgctgcttcctccaaaagccaaaactgatacgccgcctgcgccgcagccgctgcgcacagcgcctcctcatgcgcgttttcttcctccacagtgcagcaaaggcgcgctttaagccgctgcaccgcatcgccgctcagcatcaaaagcaggtcttcgcggtcgtcatttgtcaaaagcttcagccgttccagcacgtttcgtatctccatttgcccctccttttttttattcggcaaagccgtaccaaagcggtacggcttgccagaatcgaataaaatcagtagctaaggccctgtgcggcgccgccgtagatctgtgcaaagcccgccacggcgctcacggccgcgcgttccatctggcggtcgatgagcttgtcgtagtcggtcagcacatcgcccgcctgcaccatctcaagcgcacagttcttgtcgagcgcaatgatcttcttcgcgtccatggacggcacatggatgagcgtcgcgccaagcggcgtgatgagcttgcccacgcccttaatgttgaggctcgcctgcgcgtccttaaactccgtgatcttaaggagcgcctgcaaagcagtcgttccggccaggatcgtattgaagttatagtcggaaagcttgccccacagcgtcacaaggtcgttgtaggtcggcgcagcggtaagcgccgtcacggtgatgcccgtattcgtgccgtcgccgtttaacagcacgtccactgcgtccttcatctgtctgcgcgcaatgtacgcaccgatctggcgcagaatgaccgtaaagaggtccagtctgtggtggcgcagcgcttcgtaggagctgacaatcagtctgccgcgcttatgcagcgtcacaagcgagcccgccgtcttgatgactgtctccggaatggccgcgccctccgctacggggtcttcgatcttctggtcagaagccgtcgccgtctgcacggtgcggtaatcgagcgtgtcgatcttcgtcacggtcgccgcgatgtccggcagggaagacgccatctccatgccctggcgcactgcgcgggcgacgtattccgggaacagtgccgcgctctgggaggaggtgaaaaacttctccacggtgtcgcagttcgcaccgctcacacgaataccgaagcgtttaagctgtctctggtatgcgtcaagccccgcaaacggtgtgcccgcgtagttctgggagccgtccagctcctccaaaacctgtgtaaaattcttgcccggcacgccgtacatgcctttttcgagtgtaatgttttcaaatgccattgtatagtctcctttcttaaatgcggaacgcgccgtcgtctgccgcgttcgtgtcttccgtcttttccgctgccagctgcggcattatgggcattttccgctccgccgcctttgcgagcgccgccgccatttcttccagttctgcaatgccgagcgactttgtgattgcctccgtcagtccgcgtttaaactccggctgcgccacggcgctcagcttatagatgcgttcgcacagcgccgcacggtagcggtcgccgcactctgcgcggtcgaaaagcgctttcagctccgttttgagcatgttgagttcctccttcgccaccgtcacgctgtcttcgccgtccgcgagctttttaacaatgtcgtacaccgttttgacctcctttttcttctccgattcttcaaagcgcggtgaaaatttctttaccacgcccgccgcgcgctgtgcaggcactgccacgaatgagaattcatacgcgtccgccgcgccgcttaaaatacgcacacagcgcttgccgttgtacgttttccccggcacgtgtacacagctttccgcgccgcacacggagcacacgcgctttttcactgcgcaccccacgctgacttccttgcgtatgccgctttcaatggattcaataaacgccttcgtcccgtcgtttcgcggcacatacgcccgtgctgtgagctgcgcatatggctcgtttaaagatgttacctttccgggaatttccttcaccgcagcgtcaaacacgcgcgccgtctgatttttgctcgtcggctcgtggtctaaaatgcccgtcttgccgacaaacagcttcgcaagctcctcgagtgtctctttcgtaaagcactcaccgtctctatccacctcgttgtcgcacaaaacgaccgaaaacgtgtacacctcctccggcttataggcgcggcgcgtgtaaaggttgatcttctccatcgccgttttatccggctgcacagccgtcaccgtttcgctcaagcttctccctcctttaaaagctggttcgtcttcgccatgagatacgccgcgttcgcgtggtcgacctcgtcctgcatcgtgatctcgtcccagtcgatctccaccgtgtcgtcaaagccgtttaagcgcagccacgtcttgcagatcttcaagaccgccggctccaaaattctgcggtacgccgtcagctcgctcgtcagcatgtccgcctgctggctcgacatgcgctccgtcgaggaccacgaaagccccagcaaaaacggcggaatgcccattttcgccacaatctgctccagcatctgccgcacgggcacttcgctgtccatctgctgcccgtccgcgccgatggctttaatctgcacgtcgcccaccgccacaaagtcgctcacgccggggccgtgcatcgcacggctccactcctttgcaagctgccccgcgcggtcacccgcgttcatgtagccctcgtttttgcacgtcaccgcaaagcgcacattgcccatacgctcccagttgatgccgacggtgcggtaaattttcaaaagcacctcgctcacaaacggcaggccctttaaaatggagcttcccaccgcgctgcccggcatcgggtttaacgccgaagtcaaaatgagctccgggtagcggcacggctccgcacgcccgtcccttacgacgaacacgcccgtttcaagcggcgagatgagccgaatctcgaggtcttcgagcgacgcattatacagcgcccgaatttccccgtttgcgagtacgatctccccaattgcattgccatacgttaaaagctgctcaaaataggccgacaaaaagttatcgatgcccatgttgcagccgtttacgggcacggtttttaaaaacccgcgcagcgcgttttctgtgtgcttttcggggcaatacacctcaaacccgccgataagacgcaccagcttgtaaattgccgcgtcgatgatcggcacctgctcgcgcaaggcacggtacagagctcgctcgcctgccgtcaccggcagcaccggcgggtacccgccctgcgtctgcaccgaaacggccgtgcgcttctcctttttcaaaaatcccaaatgctaactcctttccccgtctccctttgcaccgcgcaggcaaagctttcgcccgcgccgagcaccgtggagacaaaatagcggatgtcgtccatggcatggtcattctccttcacaggcacatcccgcgcgccgtcgtctgcccagcggtagagggaaaactcccgcaccgcgtccacgcagccctttgtcaccttgatctgccccgtgcgcagcgccgttgccgtcatgcggatgccgtttaaaacgtcatttttcgccgccgtcactgcaaaaccacggctctgcaaaagtgtgataaagctcgccgccgaggggtcgcatacaatcacatcgggcgttctgccgcgaatgagctccaaaaaccccttaaagtgctcctcgtccgtgcgccgcgtgttttcaagccgcgcgtcaaagtaatactcgtctgcgcggtaccacacgccgcacaaaagcccccaaaggcccatggaggtcggatttaccgtgccgtaatcgatggacaccgcgtaccgctcaaagtccgctttcggcacttcgcacaggaggtcaagcgcaaacgggtaaatcagtcccgtcgccgccgtccacttgccctcaataaaccggctgtaaaacgcacccgaaaacatcgttcggtagcgctttcgcacatcttcactgagcgacgggttgtcctccatcgtaaagtgcaggtaaagcgcgtttcggctctcggctttcaaaatccactcgcggtaaaaccaatgctgcgggtgctccgggttgcagttgaaccacagcttcgcgtttttcagcgaacagcgcgcaatgccctgctccacaaaagagcgcggcatcagcgcaacctcgtcaaacaaaacgccgccgagcgtcataccctgaatgagcgccgcgctcgattcatctcgtcctccgaaaaggtaaaagcggttttctctgccctgatacgataggatgatctcgttctctgcctgccgcacgcgcatggaaaagcccatagactttagctttggtataagctccgcgaccacatttctccgcacagaacggatcgttttgccgcacaccgcaaagctcgtattttgaaagcgtgccatcgcccacagaaaaaaggatatccccatacaagtggttttgccgctgcgcaccgcgccgtcgcagatgacggcaagcttattccggtgcgggcttttttcgccccaccagcacaagacctgcatctgcttttcggaaaacggcgtcacggcttatccccgtctttcagcgccgccgcgccgctttcaatggcggagagcagcgcctgtgcacccgtcccgctcgtctcgagctcactgaggagccgcagcgcttcgatccggtcgaaaaaccgaatttccatgccgccgtttttcggtctgcgaatttcggagacggcgaacagatccatgtttttcagcgtgcgcgggttcacttcctcgcaaaagagcagccttacggcatcatgaatgccgccgaacgccaatctgtgaaagccctccttcgccgtttcgttcaccatgttccacatcctctctgaaagttttgaagcgccaaacggcgttcgttttttcgctcgcctgtttgtctcttcacccatatccccaaaacgcagaaaagtttccctcaaaagggaaacttttcaaattcatgtcctccgatgtcctacaatgtcctctgatgtcctgcgatgtccggcggtttttatttaatttcaggctccctctgattgaggaaaaagaagagataacgcgcatcaacgcatgctcacagctatataaaaagggcggcatggagccgccctttcagggaacctatgcaaccgggtttcctagactaaacagtcccccggactgttcaagcaatgcaaagcattgctttctaccattcctggttttttgttaggcaataagattttgctttctgaggaaagcgacttagggcgctgccctaagaacccgcaagttttctgaagaaaacttgaccaaagactttacttgtcgttctccgtgagcacatcgtgcatcaaaaacggcagacatttctcgaatttcacgccccaaatggtgttgtcaccgcatgcttttctcgtttcttctatgcactttgcggtgtaccgcacggcggcggcacaggcctcctttaccgttttgccgtttaacatcgcccccagcatcacggccgcgaaaatatcccccgtgccgtggtatttgcccggcacgcggtcggaaagcaccagcgccgtctcgtctttttccctatcgtaacacgccgcgccgattttctccccgtccgtatacgcacccgtcagaatgacgatcttcggcccaaagtcggaaagggctttcattactcttttaagctccttttcgtcatacggcccgtccttaaacggctcgtgtaaaaggcaatacgcctctgtcatgttcggcgttaaaatgtccgctttttcgcaaagcctcgtcatgctctgcgccgtttctttattaaaaatgccgtacagcgtgccgttgtcgcccatcacggggtctacaaggcgcagcggacggctgtgttcgtccgtaaacagctcgaagatttcccgcacagtgtcaatctgctcgcggctgctgaggtacccggagcagatgccctcaaacgcggccccctcgcgcttccagtgctgtgccgttttcagcatatcgtccgttaaatcgcggtacacgggatctttaaagccgccgtgtgtggaaagcaccgccgtcggcagcacggatgtctcgcaccccaaggcggacagcaccggcagcatcaccgtaagcgagcatttccccgcaccggaaagatcgttgatgaccgccgcgcggcgcggtttttcttctgtatttaaaaactgcatcgggtttttccctcatttcaaaagtatttccgcttttattgtaaccgcggcggaaaataaagtcaattagcggtttacaggtgaaaaaaagaatggtaaaataaagggtacacgtacaggcatgccctgcacccgcgaaaggagctttctatgaaaaccgaaaagcaacgcaagctcatcgttcgcatcggcgcggcgattttggccgggctgatgatcctctcggcactttccgccgtactattcagttgaatacattcaaccgtagaaaaaattaaccccttgaaaatacattgtaaaggaatgatccacccatgagtaaaccgaagtattatatttcgacggctatcgcctacacctccagccgcccgcacatcggcaacacgtatgagatcgtgctcgccgacagcattgcgcgctataagcgtatggagggctacgatgtctacttccagaccggcacggacgagcacggccagaagattgaagaaaaggccaatgccgccggcatcaccccgaaggaatatgttgacaacgtcgcgaagattgtcaaggcgaactgggacgtgatgaacacctcctacgataaattcatccgcaccacggacgattaccacgaaaagcaggtacaaaagatctttaaaaagctctacgagcagggcgatatttataagggccactacgagggcatgtactgcacgccgtgtgagtccttcttcaccgagtcccagcttgtcgacggcaagtgcccggactgcggcggcgaggtcaagcccgcgaaggaagaggcatacttcttcaagatgagcaagtatgcagaccgcctcatcgactatatcaataagcacccggagttcattcagccgccgcagcgcaaaacggaaatgatgaacaacttcctcctgcccggcctgcaggatctctgcgtttccagaacctccttcaagtggggcattccggtcgattttgatgacaagcacgtcgtgtatgtttggctcgatgcgctcacaaactacatcaccggcatcggttacgactgcgacggcaactccaccgagcagttcaagcgtgattggccggcagacctgcacctcatcggcaaggacatcatccgtttccacaccatctactggccgattttcctcatggcgctcgacctgccgctgccgaagcaggtgttcggtcacccgtggcttctgatgaacggcggcaaaatgagcaaatcgaagggcaacgtcatttacgcagaagatcttgtagacctcttcggcgtagacgcggtgcgctattttgtcctgcatgagatgccgtttgaatccgacggcaccatcacgtgggatctgatgatcgaacgcacgaactccgaccttgcaaacacgctcggcaaccttgtaaaccgcaccatttccatgacaaacaagtacttcggcggcgttgtagagaacaaaaacgtcgtagaagatgtcgataacgacttaaagagcgttgtgctcgccacaaagaacagcgtgcagacgaagatggatcaactgcgcgtggcagatgccatttccgaaatcttcacgctcttcaagcgctgcaataagtacattgacgaaacgatgccgtgggcgcttgcaaaggacgaagcgaaagccgacagactttccaccgttctctataatcttgtggaaagcatcacgatcggcgcggcgctcctcacaccgtttatgccggacaccgcagagaagatcgtcgcacagctcggcacgaccttgcgcgcatacgatacgctcgatacgttcggcgtttacccgaatgggggtaaagtaacagataagccggagattctcttcgcccgtattgatccgaaggagatgggcgagaagattgccgctgtggaagcgaagtacgctccgaaggaagagccgaagaaggaaattgagggtcttgcccagatcaatattgaagactttgcaaaggttgaactgcgcgccgcaaaggtcgttgcctgcgagccgatcaagcgtgcaaagaagctcttgaagctcacgctcgacgacggcacctccacaccccgcacggtcgcgtccggcatcgcgaagtggtataagccggaagacctcatcggtcacaccgtcatcgtcgtcgcgaacctgaagcccgccgtgctctgcggcgtggaaagccagggcatgatccttgcggcagacgcaggcgaggacgatgtgcgcgtcgtatttgtggacggcaccccggcaggctccaaaattcgctaaggaaaatctctatgatatttgattcccacgcacattacgacagcgagcagttcgacatcgaccgtgacgagctgctcggctccgtactgccgcaaaagggcgtcgttgcggtcatcaatatggcagccgattatgaaagcctcaaaaaaaccgtggcgctctgtgaaaaatacgattatatctacggtgcagtcggcatccacccggagtgcgcaaacgacctgcccgataactggctttcggacgtggaagcgctgctttcccacccgaagatcgtcgccgtcggcgagatcggtctcgactaccactgggaggacgagtgcccgcgcgaaaagcagaaagaggtgcttatcgcccagctggagctcgcgaaaaagcacgacctgcccgttgtcatccacgaccgcgaggcccacggcgatatgatggacattctgcggaaatacaagccgaagggcgtcgtgcactgcttttccggcagtgcggaattagcacaggagaccgtaaagctcggcatgtacatcggccttggcggtgttgtgacgtttaaaaacgcgcgccacagcgtggaggtggcaaagaccatcccgctcgaccgccttttgaccgaaacggacgcgccctacatggcgcccgtgccattccgcggcaagcgctgcgacagctccatgatcccctacgacgcggcgaagatcgccgaagtgcgcggcatcacggcgcaggaggttttggaaaccgcctgcgaaaacgcctgccgccttttcggtatcacgctgccgagcccgcaaaataaaaggagcgatcatcttgaccatcacgtatgaatacggcgataacctctacatcaacgtcacgaaccagtgcccgaacgcatgcgacttctgcctgcgcaacaacagcacgggcagcctgtacgcggataacctctggtacgagggcgcggagccgacaaaagaggaaatcttagccgaccttaaaaaacgcgatctcaattcatacgcggagattgtcttctgcggctacggcgagcctgcctgccgctgggacgacatgctttggcttgccgcgcgcttaaaagaaatgggcaattacaccctgcgcgtcaacacgaacggccttgcagactgcatcaccgggcgcaacgccgcgccggaaatgcacgggcttttggacattgtgtccgtcagcttaaacgcgccgaccgccgaaaagtacgacgcggtatgtcactcgaaatacggcccggaggcatttgatgccatgctgcactttacggcagaggccgtaaaaaacgtgccgcatgtggtgatgacggtcgtcagcaccatgcccgcagaggacattgaagcctgccgcaagctgtgcgaaaacgccggtgccaagttccgtgtacgcgagtatatctccgaataactgcataaaataacgaaagcagagtgctcaagccgaacactctgctttttgttttgtgattttagtttaatttaatcttgaatgtgattggcttatcggacgtataattcgtcttgatatgcagcccgttttcgtcgcgcgtccacacgggtgcatcgtctgtgccgagcaccgaaacgctctcgactaaaccgtggtacaccgtaccggcggtgtgctcctgcatacgcagagagcgaatgtggtattcgccgttgtcgttcaccttcagcgcaatggcaaagagcgtatcgtcctttgccgtaaagcggaaatcctcgcccgtaaagttctttttcacgccgtcggaaaagccgccgtcctgcacctttgtgggtccttcgccgaacgtcctccacacgtgtgtgtcataaattgcttcgccgttcacctgcatccagtcgccgatggcagtcagcaccgcggtgtcctcatcggagatggttccgtccgctttcgggcctacgtttaaaagcagcgcaccgtttttgctgacgatgtccacaaggtcgcagatgatgtcccccgccgggcggaagtcgttattttccgtgtagcaccaggagttcagcgcaatggcggtatcggtctgccagaaatacggcttgatgtccgccatttgcccgcgctcaatatccggcaccgccgtgccgaacatgtacgcatcgaatttataatcgatggcaacctcctcattccattccgcggcgcgattataatagtacgccgctgcttttttcaggtacggctttgccgcctcctgctgaatccaccagtcaaaatagagaattttcgggtgataattgtcgatgagttcgcacgtgcgcacaagccagtcttccataaattcttcagagggcttgccgtcgatggcatcgaaattctccgggtcgggcatggagggccaatagaggtcgtcacggtccgggttttgcggcatatcgctctcaaactttttgccattgctcatgaagaaccagtgctcaatgcggtgcgaggatacgccgagcgtcatgccctgcgcttccacggccgctttcagctcgccgactatatcgcgcttcggtcccatctcgtaagcgttccagtgcgaaatatttgagcggtacatctggaacccgtcatggtgctccgccaccggcacaacgtattttgcgcccgcctttttaaaaagcgcagcccatgcgttcggatcaaacttttccgccttaaacatcggaatgaaatctttgtagccgaaatccttgtgtgcaccgtaggctttgatatggtgctcgtaaaccttggagccctctatgtacatgttacgcggataccattcgctgtcaaacgccggcacgctgtacacgccccagtggatgaaaatgccgaacttcgccttttgataccacttcggcgtccgccagcttgaaagggacgcccacgtgtctttgtacggccccttttcgatcacgtcgtcaatgttctgcaatgcttttttcatatcgaccatactattttcctcccaaaaggaacttttctctaagagatttttctcttccccattatatcagcacaccggaaatttgcaagacaaaagccgacggaaacccgccggccttttgctgttatttgcttctgtaatagacgtcgtttaattctttgagccactttttgtcgatgccgtcgagctgctcctgcgtgacgcggaacgcccagttgccgttcggcacgccgggcagggaggaaacgtgcatccgtacaccgcttgctcgttcattcatgggttcctcccttcttttgcataaattgctcaaatatcgagaggttatatctcataaacttgtacaagtgcactatactctactgggctattcaatggtaatcttacacagatttcagggagaacttttggattgtacgtcattcgataaggagcaccacggcgcttacgtcgtcctcgtgcccgtctgtgcggtcttttacggcgcgctccacaatgcgctcggaaagcgcctgcgggtcgtcgtcctcatagtttgcgattaggtcgcacagccactccgtaccggaagccgtcacgccgtccgagaccatgacgagcatatcgcccgcatcgaggtctttttcgctgcgggcaaaggcgatttccggcagaatgcccacgggcacgcttttggcttccagatactccgtcttcttgcgcctgcgcagcaccgtgcccgcagcacccgccttgcgcagggagacgtgccccgtaaagaggtcgatgcacgcaacatccagcgttgcaagcgactcctccccaccctttgcgagcatggcggagttgatcatcttcagtgtgctctcaaatccgataccggcttttaagagcgactgcgccatacccgcggtcattgtgccgtccacagctgcccggccgcccgtgcccatgccgtcgcttaaaaccgagatataacgcccgctgccgtccgtgaacgcctcggcgcaatcgccgcagagagacgcgccgtttgctgcgtgctgcgcaaagccgcgctgcacggcataaacgggcttctgacacatttgcagctttaaggtatcgcccgccgccgtcacgctcggctgagtgaacgtgcgcccgcacgcgccggagatctcgcgtgtcagctgccctttgttgatgtgcaccccgtgtgtgcggcaaatgtttgcttcaatcgtcatgcggccgaatttatcaatgcggcagcagacttcaatcggcgtgagctcgcggtggcgcaagacctcgcgcacctgctccgcactgtcctcatcaaagcgctggtactgctcgaattcctccgccatgtcgccgagcatctgcgccgtggagcggaaatgttcttcgacgatggcgcgcacctgttcggcgcgcatacgggcgctttcttttgccaaaagctcgcggtattcgccgtttacggcatctctcagctccatggcacggttgcagcgcgtcaaaaacggcacatcaaagtcgctgcgttcgattttgccgcgctcccgcagcggatacgaaagccgcgagaacgttttttgcgtctcgtcgcgatttttgcgccagcacactgcgcattggctgcacccggtgcaaaccttctccgccgcgcggccgtacacatgcggcaggtcagccgccgcggtcgtctccagcttttccgagatgcgatctacggaatccgatgcgctgcgcatggcttccgccgtataccgcaggcgcaaaataacgttttttctaagagaatcgcccggcagcctgtccccgtgcgcggtgaataaattggaaagccgtcggctctgcggcaaaagcatgtataaaacggaggccgcggccacctccaccgcgccgtaaaacacctgcgaagtgctgttcacctgtaaggatgcgatgccgtttgaaatgacgaacgccaccgccacggcgaatttaccgagcggcgagaacacgccggccatcagcccgccgagaccgtacgcgccggagagatacgaaagtcccgccgtggagagcccctgcaccgtgcccgccgcaatacccgccaccgcgccacccgcaagcccgccgatgcgcgcgcagacgagcaccgtcagcacgatgagcacgcgcccgacggaaatatgcgagacggtcacgtttgaaaacgagagcagcaaaacgccgagcgagacgataacagccgccacgtcgccgctgtcaaacacggcggtctcgcggtgggtctccaaaagctgcacggtgcggcgcagaaaatacgccgtgcccgccgccaaaaacgactccgcaatgtacatggcgagcacatttgaaagcgagccgtttaaaaacaccatggcgatgcccgtcgaaagcagcggcaaaaacgctgtgaccggtgcgaagaccggatggtcgcggatggattttaactccgacagcgaccagcggatggcccccacggcgagcaaagccgcgatgtagcgcgcggggatatccacgggcgacgggaacaggtagcccaccgcaccgccgaggatgaccgcccacatggtcgaaaacggcgctgccgccgcgcctgccgccgcaaacggcgcgtatttgccgaagacgagcccacgcgccgttaaaaagcccgcaaggccgcccgccatcagccacaccgccctgcgcacatacggtacggtaagggccgcgcttatgcggtcccgcactcttaaaactgctttttcctccattgtcttttccgccctttcctgcactttgtcttttctgtgctaccattatacgaagccttgcccgcaggaaaacacgaaacaggcaggcgggttttaggattgttttgtgaaaagcacaaggtttctgtcgccgcgcctttcatgcgcattttctttgtcggtttctcttgcttcccacgtggaaatttacagttttccggctgtgccgacttgacaaaccgcaaaaaagggcttagaatagcggtaatatcaaaaccgatgattggaaatagtacccgatgcaaaacggcaaagagagcccctttcggtgagacggggtgcgagctgcgcggcgaatggctccatgagggcgggcgggaaaatcgcccgacgtttggccgcgttagaagccaagccgtaactacggctgtaaagcgggcgtttatgcgccaatttgggtggtaccgcaggaatttgacctcttgtcccttgttttaagggtgcaagaggttttactttttggggtgtatctgaaaagtcaaaaacttgtctattccacaaatacggacggtttctgcgttgaaaattctcggcagccggaaggcttcctgcggttttcgccttgaccccgccttgtctttgcgaaatatcctgcgtttcctttgttttcagatacacccgtaaaagcctgaaagtgcaaaatcaaatgaatcatatagaaaggtgacgttacgatggaatacaaattttcagaccgcgtgctcacgttaaagccctcggcaatccgtgaaatctttaaatacgccgctgacccgagctatgtttcgctttccgccggcaaccctgcgccggaagcgttcccgtctaaacagcttgccgccatttccgcaaaactgatggaagaagagccgattttggcgctccagtacagcacaacggagggctacccgccgcttttacagcatcttaaggcgtacatgaagtcctcccgcaacatcggcaccgaggacgacggcgtgctcgtcacaagcggcgcacagcagatcatggatctgttcacaaaatccatcttaaacgaaggcgaaaccgttatttgtgaagcgccgagcttcatcggctctttaaacgacttccgttcctacaaagccaagctcgtcggcatcccgatggacacggacggcatgaacatggaagcgctggaaaaggcgctcgagaccgaaaagaacgtgaagttcatctatacgattccaaacttccaaaacccctccggcatcacgatgagccttgaaaagcgtcaccgcctgtatgagcttgccaaagcgcacgatgtaatgattctcgaagacaacccctacggcgacctttactatgaaggcgagccgctgccgagcatcaagtcgtttgatacggacggcatcgtcatctacgccggttcgttctctaaggtcatctcccccggtatgcgcgtgggctacgccatcggcccaaagccggttctcgccaaaatgaccgtctgcaagcaggggcaggatgtgcacacgaatatctggtcgcaggttctgtgctaccgcttcatgacggaatatgactttgacgcgcaccttgcggggcttagaaaaatctacacgaaaaagcgcgctttgctccttgacctcatggaaaagcaccttgcgccgtacatcacgtgggacccgttcaacggcggtctgttcgcgtggtgccacctgccgaaaggcgttgacatgatggaattcgtacagaaagcgctcgaaaagaaggtttgcgttgtgccgggcaccgcatttttgacggatgaaaacgagccgtgcgacgcgttccgcatcaatttctccaccccgaccgatgagcagctcacaaagggcatcacgctgcttggcgagaccatccgcgagatggtggaaaaataaaggatatcagagaggaaaatcaccatggaaaataccgtaaacaccacacccgaaacaaaaaagaagcgcgttttgagcatgattcagccgacgggcatgttcacgctcggcaactacctcggcgcgctgaagaacttcgtcgcgctgcagaacgactatgaatgcgtgtacgcgcttgccgacctgcacgccatcaccgtgcgccagaacccggcggaattccgcaaaaacacgctttccgcctacgcgatgatgctcgcgctcggcatcgacccggaaaagagcattttcttcatccagagtcaggttccggagcacgcacagcttgcatgggtattgagttgctacacccagttcggcgagctctcccgcatgacgcagtttaaggataaatccgcaaagcacgccgataacgtaaacgcggggctgttcacttacccaagcctgatggcggcggacattctgctgtataacgccgattacgtgccggtcggtgccgaccagaagcagcaccttgagctttgccgcaacattgcggagcgctttaacgggctttactccccgacattcgtcgtgccggatggtcttatcccgaagaccggcgcgcgcatcatgtctttgcaggacccgacgaagaagatgagcaaatccgatgaaaacacggcgggctttatcactatgctggataccccggcggagatcatgaaaaagttcaaacgcgctgtcacggacagtgaagcccgcgtctactacggcgaaaacaaagccggcatcaataacctgatgggcatttacagctgcattacaggcaaaagctatgacgaaatcgaaaaggaattcgagggccgcggctacggtgatttcaagaccgccgtgggcgaagccgtcgtcaaggagcttgagcccattcaggcgcgctataacgagctcatcaaggataaggcataccttgaaaagtgctacagcgaggccgcgccgcgtgcagaggccattgcgcgccgtactttgcaaaaggtcatgaagaaagtggggtatttgccggtcgcacactgagcatacgggaattgacaatttctctctaagccagtataatggacatggaaatcgaaaagccgcagcggtctgtttccgcgcggcttttttcttgagaaaataaacgaccctttttacagaaaggatggatccaatggcaaagcacatggccggcaaaaatcagcgcccgtattctgccgaaggcagagcgcgccgcgccgcaaaggctgacccgcgcagcacggcttccgagctgacgccggaaacgctgtacgcaaagcaatcgtcacaaagcgaaaagcgcgtcccctcctccatagaaaatctgcattttaccccgaagtcgccgaaaaacggtcccgagggctttgaagaaacacgcgaatatcccgcaccggcagcgccgcaacaggaagcgccccgctcggcgcgccctgcgcctgcacccgctccacggccggagccgtatgaggacgaagacgactacgaagagtacgaagaatatgaggaaggctacgacgataagccgcgccgaaagcgctcgcccgtcgtgcccatcgtcatcgtgatgatcgttttggccatcggcattttggggtacattgcgtacagcctcggtgcgttcggcaagttcttacccgctgccgccacacctacgccggagcccataccgaaagccgccgcaacggcagagccgacacctactcccactgcagagccgaccgccacgccggagccgacaccgccgccgatctatgacgacggcacggagggctacatgtcctcgggcattctcatctacaataacaagggctttgaaatgttctacggcagcgacagcatggcgaccgcctacgccgaaacgctgaatgactgtgcaagccagctttccggcacaaaggtgtacagcatggtcatcccgaatcactcggaattcggcgtgccggagcgcgtgcgcaattactatgaggaagcttcccagcgtgagaacaccatggcggtcaacaatacgctttccgcaagcatcaccgcggtggatatttacgatgcgctgaacctgcacaacaacgaagacatttattttgataccgatacccactgggcaccgctcggcgcgttttacgcgtatgaaaaattctgcgaagcggcaggtgtaacgcccacgacgctcgacagcttcacgaaaacgtcctctgacttcacgggctaccttgcctacgttacgagcgaagacgtgctgaacaacaaccccgatacactcgatctctacgacccgaagtacaactacacatgcgaaatttcgtatgacgggcagtattttgaggaaaccgacagcctcaatagccacgacgagagcctcggctacgccatgtacctgcatggcgatatgggctgcgtgcgcatcacgaatcacgacctttccacgggccgcaagctgcttgtggtgaaggactcctacggcaacgccatgggtccgttcctcggcgcaagctttgacgaggtacacgtggtggacttccgctactttgaaggcgacctgccgacctactgcacggagcacggcatcacagacgtgcttttcgccgtcaacgaaatggccgtcaataccgagcagcaccagaattcaatccgcgcaatgtttaattgagcatcgcatcgattttcaggcataacctaaaagactccctctgtcagagggagtcttttttacaaaactttcaccccagcagctccggcctttcctccaaaagcttctgcaagctgccgtcttcgtagcgatagctcatcacaacgccgccggtctgcgtcttttcgcgcgcttgtcccattgcggcgccgaagtgatttacccgtaaacccacaaaacgcaaagcctgtgcatatgcgcgcatagaaaaacggcaccgttacaaaacgcggtgccgtttgcttttattgggttagatcgacttatattcgtccaaaagactttgggcgagcttggagttgacgacggcgaaatcgtccggggatttgtaatcgagcgtgcgcaaaacctcctgcgactggcggtacacagccattttggtggtctggtatacgggctcctgacgacccttgacgaacagtgcgaaacgcagctcctcctccgttgcggcacagaaataggcatgcacattgccgtccagatttttgcgcaccacggtgacgatggcgtttttcacaagctccacggcggcatcatcgaggccggcctcgaaaatgaggattttctcctttaactcctgcgggtttttcacgctgcgctttttcagcgcgcgcacggcggggataggctccgcgccggaaacagcgccggaggggcgcaggcagatcataaacgcgttcatcgggtcatggtagatcatggggtacgccatctgcgcagtgtagccgcagtggcggcattcccagtcaaacatggattcgcgcagaatgtcgcggcgcaactcggggttttcttccgcattgacgcttgtgtacatctctaatttctgcgtctggccacaggcggggcagacaatatctttctgtatcttcgtagacatcaaattcactcactttctgcaaacggaacctgccccggcgcaaaaggtgggcgtttttccgcgcaaggaatcaagcggaccataagtccgccttttaacgttcattttaaagcgcattattcgtagggaacttcttcgctttcgtctttttcgggctcagtcgtttccggctgctcggcggcaggctctgccgcttccacggcttcgtctacggtaccgtccggcacgaatgcggcttcttcggcttccttttcctcttccggcgtgggagtgtactcctgcacgtcgtcaagggtgatctcctcttcttccgcttcgctgtcatcctcatgggtcagggcttccagcttctccacagcggcatcgatgcgcttctgggcggcttcaatgtcgatgcagtacggctccgtaacggtgttctctgcatcgcgcaggttgtggtagtagtagcggccgagagcgagataggcgcgctcctctgccttttcctcacagcggataacggtgcgcaggcgattcatgagcgcagtgcggcggttcttttcctctaccactttcacagcgccctgtacggcgccgccggcggtcttaaatacggccgagatattcttcaaaaagttcatggtaaaactcctttcggtcaaaacgccaaggcgttcagtcatttcaagtttaaatacacctttattatatatcaaaaaagcgcaaaataacagccccaaaatgcaaataattccatataaatatgcagaaaagcggacatcgcaggacatcgtaggacatcttttgaacatttgttccgtgttcgattgacatttcggaattttttgtttatgatgagagttgacgaacacatgttctattttgaaacgaaaggatcgtgactgcaagtgaacgattacatttcctgggggcaggagtatttggatgaggcggagcgcatcaaacggcggctgctcgtcatccgcgccgaacgcgactatgacattgcaggcgagcaggcccagcgtgtgcaaatgctttacaccatgtatttggagtgtcttgtaacaggccatgcgctgcaaaagcgcggaaggagggcggtttcgtgagcggatataagtccctttccgccggtgcacggcaggcgaagctactcagccgcatcggcgcagagacaaacaaaaatgagcttttagaagcgcaggttttgctgcggcgcgccatcggcaatgagctgactgaccgccagcgcgactgcgtgcagctttactacggcgagcggctgacaatgcaggagattgcggacgagcttcacctgacgcgcggcacggtgtgcaagcacctgcaaaaggcttcggcacgactttcgcacgctttgcagtattccgcgctcggcatgcgtgcggagcaaagccgcgaccgataacccccttgaaaagcctctccgattgtgctactatttgtacagacaactcagcatagatcacagcagatttatctgcggaaaggcttatactatggatttgattcaaattgacgaaaacgggctgcatctcgtttttgaaaagacggaagatttcggctgcaagctgctgcacttctctgcgctcccctttgacgagcgcagtctgctgcaagtgcacgaccgcgagacgggcggcttgcgcctgaacaccgagcgatacaatctcttggaaattatgatttccgggcagaaccgaccgggcgagcgccacggcaacaaatacatttccacaagccccggcgaccgcatgaagctcgtctattttgcagacaagcacaacgagttcggccgcaagctggaaatccacatggaagataagacctgcggtattgaaacgatttcgcatatgcagttttataacggcgttcaggctgtacgctgctggacggacgtgaaaaatgtcggaacagagccgcaggggctggaatacgtttcctcctttgccctcaccggcatcgaaaaagagggtatgctttcgaccgacgacaaaatgcgcgtctggtacccgcacaacggctggcagcgcgaaatgcagtgggaaagctacaccttcccgcagctcggtctcgcccgctgccagcccgaggaaattcagcgctcctctaaggtgattggtgcgacgaacatcggcaactggtctacaaaggaatacctgccgatgggactgcttgaaaacacggaaacgggctccaatttattctggcagatcgagcacaacggctcgtggcactgggagatcagcgaccagatgggcaacttctacattcagttgagcggcccgacggaaacggaatcgcactggtggaagaatttgcagccgggcgaaacattcacgacagtgccggtgtgcgtaggctccacgctcggcaaatttgatgacgccatgggcgagctgacgaagtaccgccgcatgattcgccgcaaaaatgcggacaacgagaaactgtgcgtcattttcaacgactacatgaactgcctgtggggcaacccgacgacggcgaaagagctgccgctcatcgacgcggcgcacaaggcgggctgcgaatacttctgcgtggacgcaggctggtacgcggacggcttctggtgggacaacgtgggcgaatggctgccgagtaaggaacgtttcccgaacggccttgaggaagtgatggactacatccgctcgaagggcatgatcccgggcgtgtggctcgaaattgaagtaatgggcatttgctgcccgaaggccgcgcgcgtgcacccggactggttcttcacacgccacggcaaaaaggtgcacgaccgcagccgctggcagctcgatttccgcaacccggaggtcgtggagcacgcaaatgaggtcgttgaccgccttgtacgcgactaccacgtgggctacatcaagatggattacaacattgagccgggcatcggcacggaattaaacgccgacagtgtgggcgacggtttactcgggcacgagcgcgcatatcttgcttggcttgattccgtctttgcccgctaccccgaccttgtgattgaaaactgttcctcgggcggcatgcgcatcgactacgcgatgctctcgcgccacagcattcagtctacgagcgaccaggaggactacctgcgctatgcgtccattgcggcgaacgcgccctcgggtctgacgccggagcaaagcgccatttggagctacccgatgaagggcggcggacgcgaggaagccgtatttaatatgtgcaatgcgctgatgcagcgcattcaccagagcggtcaccttgcggaaattcccgaggaagacttcacgctcgtcaaggaagcgctcgattattacaagacgatccgcggcgacatcaagcgcgcgctgccgttctggccgctcggtacgtcgcactttgcagacacatgggtctcgctgggccttaaaaccgcgcacaaggcgtacatcaccgtgtggagacgtggcgcgccggacggccgctgcacgctgcccgtggatttcctgcgcggcaacgagcacgtaaatgtgcgctgcgcataccccgcaaaccacaacacgaaatgcgcatggaatccggaaaagggcacgctgaccgtggacctgcccgcccccatctgcgccagaatttttgagcttgaatattaaacctgcacctgaacccgtacaggacaccgtgcaaaatcccgatgcagacgaagaaagacatctcgcggaagaagcgcggcagcgcgtggaggaagcgcagcgccgggcggagcgtgccgcacagaaaatggaagacgcaatgaagcgcgccaagcttgcgcaggagcagttaaaaaaggcgcaggcagaggccgaaaagctcaaaaatcagaacaaaaagacgtaaaaaatcgcccgcaggcacggaaaacggttgcctgcgggcgatggtttttgaattttacttttcgatgtctttttcgacgttctgcggagcagtgggcgaagaagcgggctgcacgggcatctgcacggaagccgctgcgggtgccgaaacgggtgcgtaggcgctgcgcattttggcggtggtgaccatgtgctttgcgccctttgccatggcgatgatggtaggcacggcaccgatgacggcgaagagatagacctgcgcaaggccgccgaagtaatcgccggaatcgacatagccttctttgataagatccatcatggcgcggaacgcggtgaagaaatcggtctcatagaactgcgccgcggtgattgaccaatcggcctgatacgcaaggaagatcatcaggagcatcaaaacgcaggaaatgatgatgcccggtgtgccgagctttttgccgagcatttcgtagccctttaacgtgcagatggccatgacaaggccggaaacggcggcgacgtagccgagctgaccgacaatgacgatgacgacggcgccgataagcgaaccgatgagcgcacctacgataccgggcaaaacctgctcctgcttctgcatttttgtctggttctgctgcgcggcggcttcgctgacctgcccgaagcacggttcacacaaaaggtacgcgttgccggagacggtgtaggcgtctacgccctccgggcgaccgcaatgctcgcagcaatttgtatacccgtttgttctgaggaacgtgatgagcgtatcaagcgcactgtgcagggcctctgccattttatctttattgccggagagcttcacaaggaaattgacgcggaaacgctgcacggtacagccgctcaaaaccttattcattttctcgagcggtttgaaatccgcggggttcggcgccatgcccatgcgcgagaccgaaagcgaaagcatatagtagacgcggttgttggcgttcggcataatggtgacagtatacccctgcacattgccgaaaacgccctctgcattcgggtcatacataaggccgttcacaccggccgctgccgcaagctttgccatttgacttttgttcatattccaatcctccaaatgttgttctttacctgtattctactatattcaggttggttcgtcaatcgggtggcgcaggaagtttttgttgccgaactcgccggaatgtaccttaatggcgacgttgccgggcagcttgcaatcgagctgcttatacatttcaatgaccttttcagggatgaccgtttttgtgaaataaaccttgggtttcacgaaaattcctcctaagaattcgttatgtacgggtgtgactccgcatacatttctataacattaaaagtttactttaagtcaatatgcgttttggctaattttgcaccggtcaatttggtgtgttcaccggatttgcaagcagaatgttcaaaaagtcttttcttccggaactttctgcggtaaaatagggaaaaacggagcatgatgcaggaaaggaagtattttgatgcagaaaccgcttgtcagcgttatcgtgccgatctacaacgcgcagaacaacattgtgcgctgcgtggagagcattcggcggcagacgtatgaaaatcttgaaatattgcttttgaacgacggctctaaggacgtgagctacccggtgtgcgagatgctctcgaaggcagacgcgcgcatcgttttgattgataaggaaaactccggcgtttcggcgacgcggaacctcggcatgcgcatggcgcggggcaaatatttgcagtttgtggacgcggacgacacactggagccgtttgcgacagaactcctcgttcagcgtgcggaggataacaacgccgatctcgtcattgcggcgtataaccgcattgtgccgtacaagccgaaaaaggaagcgaagcttgacccgcttttgccgaataaaaagaagcagctgacggagcggctggcgaaattccagacattcggctttctgccgatgggctttatgacaaaggaagaattcgcctgcgggctgatgcaggagccggcgagcttttactacggcgtgatgtggaacaagctttaccgcgccgatttggtgcgcgcacacacggacgtgcggtgcagcgaggaaatgacgtggagcgaagacctgtattttaatttgacgtacatacgctatgcagaacggttttttgcgctgaccgcgccaatctacaactactacgacaaccccggcagcgcggtgcatctgacgaaggtgcgcacggcgattacggcgcgcacggcgcttttcagctactacaaggaattatacgagcagcttgggctgtacgaagaaaacaagctgcagattttcaaatacctcatctcctcttcggaggcgtgagcgcggaaaggacgtttaacatggcattcgtactcgaccaattaaagccgaaccagaaatattttgaggcaatctgcggcattccgcacccctcaaccgaagaaaaagccgtaagcgactacgtgtgctccgttgcggaaaagctcggtttaaactacgagcaggacaaatttgggaatgtcatcgtgcgcaagccggcttctaaagggtacgaagacgcgcctgtcgtgatgctggaggggcacatggatatggtgtgcgtgaaaacacccgagagcacgcatgatttttcgcatgaccccattgagatttatgtggacgacaagggcgacatccgcgcgaaagacacgacgctcggcgcggacgacggttacggcgtggcgtacatgctggctgtgatggaggaggatttcccccacccgccgctggagctcgtctttacggtgcaggaggaaaacggctgcaacggcgtggacgcgctggacgcgagcaagctgaaatccagaagaatgatcggccttgacgtgatgggcgagacggtggaatacacaagctgcgtttcctgctttacgagcgaccggatgaagcttacgaaaacgtgcgagacggagcctgcaaagggcgcggctctcatgctgacggtttccggcgtgcagccggtgcactccggcgcaatggtgcacccggagcagttcaatgcgattaagatcacggcgcgtttgcttaatgcgcttttcgaaaacggcgcggcgtaccgactttccaccatggagggcggcgaagcggaaaactatgcgccggtggagacgaaaacggtgatcctctgcgacgaaccggacgcagtgaaggcgattttaaacggcgagcttgagaagatcgaccgcgaattgcaggacggcaagcagaatttgacgcttgaaatccgcgatgcggcggcgaacgagatgctttcggatgccgatacgcaggcgattgtcgatttgatctacctgatgccctcgaacacggtggcaatccggaccgcgggcgaggagatgacggcgacgaacaacgtgggcacggtatcgttaaacggcggcgcatttgaactggtgatgtccgaccgtgcggcgagccgcagctttaaaaacggtgtgctcggccgcgtgaagcgcttggctaaactctgcggcttcacgcttgaaacgagcctgcgctatgactcctgggaataccagccgaactcctacatgcgccgcatgacggccgacctgatgaaagaagtgtacggccacgagatgatggagacggcgtgcccgggcggacttgaatgctgctctttactgccgcgcatggaggggctggacgttgtgatgttcgcgcccatcggcgaaaactgccacacgacagacgaatatatgaatctaaaatcgtttgaccgcgtgtatgatttcctcaaaacgctgcttggcaggttgaaataaatatttataatttgatataaatattaaaaagcacgcccctttccgatgaatttcgggaaacggcgtgctttacttatctgcgatctatggtgacaacggtgcgataatcgggatcgagcttttgaatttcggcctccaacttttgggtgatgacggcgtcgctgtccttcaccgcgaacggcacggcagcgtcgaacacgatattactgtgcgtaacgccccagatgacgcggaaatcgtgaatggtgacggtgggatacagcgcggtgacgagcgactgcactttgcggtgcagcgcatcggtgcgggcatcgccgacgataacggggtcaaggtgaatgaccatgtggataccgaggtcacggctgaaatcgcgctcgatgttatcgatgagatcgtggctgacgagaatgtcgtttttggcatcaacctcacaatgggcagaggcaaaacagcggcccacgccgtagttgtgcacagcaaggtcatgcatgccgatgatgccggggtacgagagcattttctcggtaatggtctgtacgagttcgccctccggcgcttggccgaggagaggatctgcggtgctgattgtaagctgcacgccggagaacacgatgaacagcgcaaccgccgcgcccatgtagccgtccaaattcacgccggtgagcatggtgatgacggcgccgagcagcacgacgcttgtggcgatgacatcgttgcggctgtccttggacgtggcttcgacggactcggatttgatcatgcggccgaccttgcggtaaaagaggcactgccagagctttgccagaatggaaatgacgagcacaacgagggcgacgggcgtgagggcgttttcctccggcgtgaggattttctcaatggacgacatgccgagctgaagcccgaggaaaatgacgatgaacgagacgatgacgcccgaaagatactcgatgcgcgcgtggccgaacgggtgcttttcatccgccggtttacttgccattttaaagccgatgagcgtgacaacggacgagccggaatctgtgaggttgttgacggcatcggccgtgacggaaacactgtgaaaaaccgtgccgacgataatcttcattaaaaaaagcagaaaatttgtgacgataccgacggcacccgccacgcggccgcatttgtcgcgcacggcaggatcctcggtatttttatgatcgcggacaaagatccgcaaaatgagatcggtcataacgaaaatctccttttggttagcggctgaaaacccgccaaatatgcaagcagagcttgaggaaagcttctcaaactctgcttttgggtgatttaattttgtaaatcggcttacttctggtcaaagaactcgacgatttcgccgcaggggccggtgcagaacgcaatgcgcgcggtgatgtcggaaagctctacatctttcggttcgatggtgatctcgtagccggcttcacggacacgggcgacacaaccgtcggtatcatctgttgcgagcgcgagatgggcaaacttgccttccagcggcacatcgttctcttccgggacgggcagcacttcgatgcagctgttgtccccggtggagatcatcatgcaggggtatttttcgtcgccccactggcgcacgaccttgaggccgagcaggtcaagatagaacgtttttgctttttcaaactgcgcatacgtcggacgcagtgccacgtggtgaatgcctttgatcaagctcattttattttcctcccaaaagtacattttataaagacagggtatcgagaccgataccctgcttgatttgtaattctaaattactttctgttgaagatggacatgatgtcggagaaggtatcatcgtcgctcttcgcggaagttgtgctgccggtgctcggcgcagacgggttgccaaagaggtctgcgtcgctgatagccggagctgcgggcttctgggtcttttcgccgttcatgccgtcgaagccggtcgcaataacggtgaccatcatctcgtcttccatcgtctcgtcgaatgcagcaccccaaatgatgtttgcatcctcgcttgcgcgctcggtgatgagctgagacgcgacatcgatctcgtcgagagcgatgtccggagaggatttgatgttgatgatgacgcccttggcgcctgcgatagcggtctcaagcagcggactggagatagccgcaacagctgcctgctctgccttgtccttgcctgccgcacgaccgacgcccatgtgtgcgtagcctgcatcctgcatgatggacttgacatcctcgaagtcgaggttgacgatgcccgggatctggatgaggtcggaaatgctctgtacgccctgacggagaacgtcatcggcgatgctgaatgcgtttgcaagcgtaatgcgctgctcgctgacgagcttcagtctttcgttcgggatgacaacgagggaatcgacgtgcttgcgcagctctgcaatgcccttttctgcctgatccatacggcgcttgccttcaaaagcgaacggctttgtgacgatgccgacagtgagggcacccatatcctttgcaatctctgcaacgaccggtgctgcacctgtgccggtgccgccgcccataccggcggtgacgaagaccatgtctgcgcccttgagggtagctgcgatcagctcgcggctctcctcggcagcctttgcgccaacctccggcttggagcctgcgcctctgccctgtgtattcttttcaccgatctgcacgcgggtcttggcctgcgagcgggacagtgcctgacggtctgtattcatgcagacgagctcgacgtgctgcacgccggcatctgccatgcggtttacggcgtttccgccgccgccgcctacaccaacgaccttaatggtctggggggtctcttcaagcatgttatcaatttcaaacggcattttatgttcctccttgatttggtctttaaccgttaacgatccgcacggatccgggattttcattcatcacgccgcctccggattcaaaacggttttctctcgagcttcgatcaaatccgccggatagcgtcccataaagggccatacctttacagttctttacagtctttcagctttacatagcttcatacactataatttatcacttttcccgccaaaattcaagatgaaagcggcaaaaaagtgggcctttgcaaatatttttactttacagcggttttcgggaaatctatggtaccggggctgttcaaattacccgaaaaacttgtgaaaaacaggggaacgcttccaaattttacacgttttcggcgtcgcctgtgttgtcaccgctgtcgtctgctgcggggtccgtgatgccgtcggtatcacccgttggattggcagtatcgccgttctccccgtcgccgtttgcggtgctgtctgagccgtccgtgcggcctgcggcatcaccgggtgcgggcgtggcggaggctgcggtgcggtcttcctcgtaaaacgccttatttttctccggcacaacggaaagatcgatggagccgacggtctcctcggtgatctcgccgctcgtttccatttgacgcagcatctcgaggccaaacgccattttgtaggacatgccgttcatgttgccgaaacggaacgtgatgcggttatcatacgtcagcgtaaggtcgtaggggttcgtcatgttgatctccgtgacgttctgcgtctcgtttttcgtcatctgctccgcgatggcgttatagacttctttgacggaatcatcgccgaacgtgatcgtttcgctgggctttgtgttcgtgggatttgccccgagcaccacagtcgtgccctcgcacggctgtgaagcgatctccagcaccttgccggaagcacttacatagagataacccgcgtcgcacgcgacggaaaacgccgtttcggcgggggtaatttcaatttcaatggtggaagggatatgctttacgatctttgcgctttcaatgtacgggaaacggtgctcaagcgctttttcgcggctttccgtttccagcagcacgaggttatcgccctcgttgatgccgcacacgcggcggatatcggcttcatcgtagccggcatctgacgtaaatgtgacgttgcccaccttgaaaaacacgaaaatgcacaaaaggaccgcgccgatgacgacgacgctgaatgcgattatattgaacaggagcagcgccctgctttttttctttctcattgcgagcttttccgctgcgctgcgtggagtacgcgccatgttcagcctccgtttttcacgttttatctcttacttttcgctctatattcggtatacgtctgcgccgagcgcccttaaattctcttcaaagtgcgcatagccgcggtcgatgtactgcgggtgcatcacctgtgtttcgccctgcgccgcaaggcctgcgatgacaagcgccgcgccgccgcgcaaatcctctgccgagaccggcgcaccggaaagctgcggcacgccctctatgacagccaccttgccctctaacttgatcttcgcgccgagccggttgagctcaccggcatgcttatagcggctttcaaaaatgttctctacaaaaatactggtgccgtcccccaccgccgccatggtcatgacgggcgcctgcgcatccgtagggaaaccggggtacggcatggtgcgcacgtggcgcacgggttttaatctctgcggtgcgcgcaataataattcgctgccggactgcattacggcgcagccggtgctttcaaacgccgacaaaaccggcaaaaggtgctcgctgttgacatcacgcagaagcaccgtaccgcccgtgacggcggccgcggccatgtatgttgcggcggcgatgcggtccggcatgacggtgtatgtgctgccgtaaaggtgcggcacgccttcgatgacgatgcagctttcgcccgcgccgtgaatgtgtgcgccgcagcggtttaagtacccggcgagatcttcaatctccggctcacgcgcggcgtttgtgagcaccgttgtgcccttggcgcgggcggcggcgagcagcaggttttccgttgcgccgacgcttgggaacgcaagcgagacgaacccgccgcgcagcccgccgggcgcagtgcacagcaggcaaccgtgctcttcgcgaatttctgcgccgagcttgcgcagcgcctccaaatgcagatcgatgggccttgggccgagctcgcacccgccgggaaacgacaatcttgcttcgccgcagcgggacagaatcgcgcccaaaaacacgatggacgagcgcatctcccgcatgaggctgtggggaatatcgcagcgggtcatgccgtccgcgcagaccgttaaggtatcgcccgtgtgggtacagcggcatccgagccgccgcaaaatggtgactgccgtgtgcacgtcagacagtgcggggcagttgtgcagcaccgtttcgccctcacagaggagtgccgccgcaagcagcggcagcgtgctgtttttcgcgccctgcacggtgagctcgccgcaaaggcgattgccgccgcgcaccaaaaccgcttcctgccgggcacagcccgtatgttccagttcatattcttccatatacacaccccgtattctgtaaggcggcagaaagcgcgcctttggatacggtcatagtatgcagcggaaaaattttggggtatgtccgcctgaaatgcgttttacggtttacttttttgctttttcgcaaatgatgttgtaaatgcgatcatttgcatccagcacggccatagctttcgcgtttttgccgatctcttcggcgcggcccggctcggaaaggacggtgttcaccgtttcccacagcttttcaccggtgaggtctttttcttcgatcatcacggcggcatcgcggttcacgagcgccatggcgttatggaactggtgattttcggcaacgttcggggacggaatcagaatggagcacttacccgtggcttcgatctccgttaaggtgatggcgccggcgcggccgatgacgaggtcagcggcggcgaggcactccggcatgttgtctatgtactcgagcatgcgaatctgcggattttcttcttcctttacacccgctgcgtgcacttcgtcgaggaatttttcatcgtgctggccgtagccgtggatgtgctggtatttcttctctttggcgctttcaccgagcatgtatgccgcggctttattgagcgccgctgcgccgaggctgccgccgaacgacagcacaagcgggcgatcgtcgagattcagcgccttgcgggcggcttcgcgctcggcctgcaaaacggaaacgcgcaccgggttgccagtgaagacgcagttatctttgcggtcgaggtactttttcgcgtcctccacggcgagcatgacgcactccgcgtgctttgcaagcgctttagtcgtcatgccgggataggcgttctgctcgtggatgacggtgggaatgccgagcttctgtgcggcgcgaatgacggggccgctgacgtaaccgccggtgccgacgcaaatatccggcttaaacgccttgatgatgcgctcggactcgatagacgaggagaacaggcggaacacggttttgatgttgcggcggatgttcttcgccgttaatttacgttgaaaacccgagatgcggatggttttgaaatcgaagcccgctgcgggcacaagacgctcttccatgccgcccttgttgccgacgtacaggatttcggcatccggctgcttggagcgcagataaccggccgccgcaagcgccggattgatgtggccggcggtgccgccgcctgcaaataacacacgcataattgaataccccttttacattttttctgtattggaatgccgcgagaccgacagcagcacgcccatttccgcaagaagcatgatgagcgccgtgccgccgaagctgaagaacggcaggctgatgccggtgttcgggatggtgtttgtgacaacgcagatgttgaggatagcctgaatgccgaactggaacgtgatgccaagcgccagcatggtgccgaagcggtcacgcgcatgcagcgcgatatatacgccgcgccagatgaaaagcgcaaacaggataatgacaataagcgcgccgatgaagccgagctcctcgcacactacggcaaaaacgaagtcgttttgcggctccgggatgtagagatacttttgtctcgactgtccgatgccgacgccgagcaactgcccggagccgatggcgtagagtgactgcaccgtctgccatgtatcgacgccctccggcgggttgaacgggtcaagccagccgtggacacggtccatggcgtaggcaaattttgaggaaaacagcacgagcgcgccgatggcggctgccgccgcgccgccgatgacggcgaaatagcggaactttgtaccgccgacgaacatcatgataaacgcgatgaggcagatgatgatggtggcggaaacgtgtttttccgcgatgacgagcacgcagatgaggcccaaaataccgaaaaacggcaaaaagccgtagcggaaggttttcatcctttcgccgtacagcgcgatgaggtgcgcaaacatcaagatgagcgcgaactttgcaatctcggacggctggaattcgacgaagccgaggttcagccagcgcaccgcgccgcctttgttcggcgctaattttgtgcccttaaagacgagcaccatcaaaagcaaaagaatggagacggcgaaaacgggcaggttcagtttatgcagctggtgataatcgaacgtggagatggcaagcatcagcacaacaccgaccaaggcgaacataccctgacggagaatgaagtaatagctgtttccgtagtagtaatacgcgtaggcatagcttgcggagaacatcatgacaagtcccacggcaagcagcacaaggatcaaaaacagcatggtcatatcaaggccgagacccaaagtgaaaattctatatttgatgcgcccgcgccgtttgccgcgccttgcggcttcggatgccgcctcttctgcgggcacggcggataaccggcgacttgggacctgttcaagcccgcgcgccgtggaacgtcttgtctgcgccattgctgcaaacctccttttttcagttgatttctattttatcccattttcaggcgtttagcagccgaacaccgccaaaagtacgccgatgataccggcaaaaagtgtaacgccgctgaacacgaagcaaatcttattctcgttccagccgcacatttcaaagtggtggtggatcggcgccattttgaaaatgcgtttgccgtgcgaaattttaaagtatgtaacctgtaagacaacagagagaatctctacaatataaataataccgatgaggatgagcagaatcggcatatccacgccgaacgccagcgcgcatactgcgccgccgaggaacagcgagcctgtatcgcccatgaagaccttagccgggttggcgttccagaacaggaagccgatcatcgcaccgacgatggccgccgcgtaaagtgaaagccccacgcggtttaaaagcatcgcgataacagagaagacgagtgcgacgacgagcgtgacggacgtattgaggccgtcgatgccgtctgtgaagttcacggcgttgaccatgccgacgatgaagacagccgccagaatgtagtagaagaagccgaggtcaacggagccaaggaacgggataaccgtttcggtggtgccgcccgcaagtgcgacggaaagcaggtaggcgccgacgatgatgaactgcaaaatgagcttttgaatctcggtgagaccgaggttgcgatgctttttgatgctgatgtaatcatctaaaaaaccgacgataccaaagcccaccgccatgagcgcacccgccacgaccttgacgaacatgagctgcgtttccgcgccgccgttcagccacaaaaatgcgatgcagatgaccgccgcgacggagctgccgatgatgaacatgatgccgcccatggtgggcgtgccctgtttatttttatgccagctggggccgacctctcgaatagtctggccaaatttgatcttgtgcagaaacggcaccatgaagtagccgagcagccctgtgatgaccgccgcaatgacgattgcaaggcaatacagtacaatatccatacgttatgaacttcctttcctaccctctcaatgtatgtttttactcttcgctgttcgttgaggtgttgcccgccgcttcgacgccgccggagctgacaaacgaaatgcggatgacggagccgcgcttgaccttggtgccctctgcgatatcctgactttgtgcgtagccggaatcgccgtcgcccacaacgagcacctgcacatcggcaaggcccgccaagtagcggcaagtatcgatatcatagccgatgaagctcggtacctccacatacgtttcgggatccggctcttcggtgtaaagcgcgaccatgccttccttcgggatagatgcacccggagacggcacctgcaccgtgacgagcgcgtcgtcttcggcgtcgccgacaaccgtgccgctgaagccctgctcttccagatggcttttcgcttctgccatggtcatgccaatgacgttcggcgcggtggcggagagattttcatattccgattccgtatactgcgggtctacgccgaggtacgggagcacctcttccatgatggcggcgaagatcgggccggcctgcgtgccgccggacgcgccgccgatctgcggctcgtcgtagaagacgagcaaggcgtactgcgggtcatccgccggggcatagccgccgtaggaaacgacgtactgcatgccgcggtcgctgccctctgccagatcctgataatacagcgcgactttttcggacgtaccggtcttgcccgccacgcggtaaccggcgacataaccgtttttgccgctttcgcttgtggcgtttttctggagaatagccgtcatgcgcttggagacatcttcggagatgacctgacgcttgtagctggtatcggtcgttttgacaatgttgccgtcgctgtccagcatgcggtctacgacgtgcggctgcacaaggtaaccgccgtttgccacggcagcaatggccgtgatcatctgaatcggtgtgatggagaagttctgtccaaacgaagacgttgcaagctcgacgatattgagctcgtcttcgctaaaataaaggctgtctgcttcgccgggcaggtcgatgcccgtgcgctgcgtaaagccgaaggcttcaaagaaattgaagaacgtgtggcggcccattttctgacccagccagatcatgtacgggttgcaggaattgcaaatgccgtccaccagcgtttccgtgccgtgaccggcgtggtaccaacagctgatggggtcgatggtgggatcatcaaacacccactgaccggtgcaggtgtacgtggagtcttcggaggccacgccggattccattgccatggagcccgtgaccattttgaaaacggagccggggtagtacgtatcgctgacggctttgtttcgccactgcttattctgtgcttcggcccacatttgatcggtgagctcgtcgcgcagtgcggtgacatcgatgcgctcgtaatccgcaagggcttttttcgcttccgcgcgcgcctcgtcggtctcggcgttatcgatggcaagctgtaaggtgtttaattcctgctgctccttttcctgcgccttttgcagcgcgtcttccaccttttccgggatggcgtcctcggcctcctgcgaaatggtgaatgggtcgttcgggtcgtagtcgccctttgtggaaagcgccaaaatggcgccggtcttgacgttcatcaaaacggccgtgccgccctccagcgcgccgcaggcctcaaggcccgcctgcagatgcttttctacgatgctctgtgcggtctcgtcgatcgtgagcacaaggtcgtagccgtcctgtgcctgcacgtattggtcatactggaacggcatgtcatcgccctgtgcgttcttcgcgctgacaaggcgacccgccgtgccggaaagctcgctgtcgtattccgtttcaacgcccgcaagaccctggttatccgtgcccgtgaagccgagcaccgtagaagccgtggtgccgtagggataatagcgcttgtagtcttccatcagcgtgatgccgcggccgatcttttcgtccttgatatactgcacgatctcatcgcgcacctcggtctccaccttgcgcttgacatagacaaagtagctgttctgctgcgctttttttaagacatcgtcgtaatcgagccctaaaatttcggaaaggccctttgcaatcttcacgtcgtcgccttcgtcgatgtagttcggctccaaggcgaccgtccacacgctggcgctctgcgccaagacctttgtgcccgtggcgtcgtaaatggtgccgcgcgagggcgtaagctgcgtggattgcaaactctggtcaaccgcatcggtctttaaggtttcgccgttgacaagctgcaggcggacaaggtttgtgataacggcgccaaacccgagcaccagcacaaagcccacgatgaccattgtgcgctgccagacgccggaacgatttgattttgccatgtaaaaaatgccgtcctttctgctgcgcccttcattcgcagccaaaagttgccgtataccgaaaaatgagagttaagaataaactctcaactctcctctcaaattcccctctgccgggggccgcataacccatttgtattctttcatgccgcaaaatagcagcgtatccgcaaaaaattcgtatgtataaaggctaaatcaggaaaagagcgactgcaagacctgccagatacggtccaacaggttcggtgtcttttcggcctgcactacggtgccctcatcatcctgcgtgaggctgatgtaggaggtctgcccgtccgctaccttttccatgccgagcttttcgcgcgcgatctgctcgatctcctccgtattgagcttggaggccgcctgcatttcgagctgaatggcaatgcttttctcctgcgaaaggctctcgttcgccgtgttgatctcatcggtgagctccgtgagctgcacctgactgaacaccaccgcaccgatggcgccgacgatgaccagcactaccgcaagattcatgagcattttgaccgtatttgcactgtgtctgtgactgcggcgcagctgtttttcatccagcttcaccacattgtttttctgtttttgtttttggggcgctttcggctccggaagcttcggtaccgcgctgccgtgatctctgctgtcgaaaagatcaaaatcgtatgcgtttgatgtagatgccatgttgtttcctcctttcggaaacttatcccaacaaattcagctgtattctctcagggataccctaatctttcaaaatctcacagtttaaaatctcacagtttttcaataacgcgcagccttgcgctgcgggcgcgcgggttttcgcgaagctcttcctcactcggcgcaagaccctttttgtagatgagcttgcccttcggcttgttgccgcacacgcacacggggaaatccttcgggcaggtgcagccctcgcaccacttgttcatctgctgcttgacgatgcggtcttcaagcgaatggaacgtgatgacagaaagcctgccgccggactttaacagcccgaacgccgccgtaagccccttcttgagcgcgtccagctcgccgtttaccgcaatgcgcagcgcctgaaacgttcttctggccggatgaccctccgcgcggcgcaccgctgccggcacgctttcgcggatgatctccgcaagctctaatgtagtttcaatcggtttttcttcgcgcgctttcacaatgccctttgcaatgcgcaccgcgcttttatcttcgccgtaacggctgatgatctcggccaattcctgccaagagagtgtgtttacaaggtctgcggccgaggtgccgctttggctcatgcgcatatcgagcggggcgtcggcgtggtaggaaaaaccgcgctctgcggtatcgagctgataggacgaaacgccgatatcgagcagcacgccgtcgacattaacgataccgtgctctaacgcgatcttgtccatatcgcagaagttgcccatggcaacgacggagccgggatatttaccgagccgctctttcacaacggcaatggcgtccgggtcgcggtcgatggaaagcaacgtgcccgttgtcaggcgctgtaaaatcgcgccggagtggccgccgccgcccgcggtgccgtctatataggtgccttccgggtcgatgttcaaggactcgatggtctctttgaacagcaccggtttatgctcaaaatgaatttcactcatgatatatttgtccggcggaacggatgcgttccggcagacactcctcattgaactttacccgaaaaaagccgggctgatgagcgccaagcggggcgaaaaggcaataaaaacccaaagcccatgcagttttccgcagggttttcgctgcttgcacgtccattataccttatcccacatagaaaatcaacccgcggcaaaaaaatttatgtttaccacgttcgatgaaaaagcgcggatttccgatatttttcttggattttattcgtatattttccgatttttggcaaaatagcggtatgttgaaaattctgtgcattctcatgcaaaaaaacttttgcagtttgttcacattcccggttttcggaagcggctccatttacacgctttttgtggaaaaacacaggattcatctgactaacggagagatgcaaagagctcccatatatataaaggacggcaatgccgccctttgggagaccccctaattgggtctcccgagcattaacagtccagtggactgttaatgctcccgtcctgatttttgggtaggcaaaaagatttcgagctctgcggagctcgaccaaaggtttcacctttggaatctgacaagcttttgaaaaagcttgagcaaaacttttaactccgttgccattcgctcattttaacaaaaacggcagctcgcccaactgccgcgaactgccgtttaaagctcttaaattactgctgtgcgctcgtgccgtggatggactggcgggtctttctcagctctgcaaggttggcgctcatcgcgtcgtctgtgcggcggagcagatcttccacatagtcgttggaggccttctgcatgctgcggaacttctcctgcgtctgcgccatgatgtcgtttgcctttgcctgtgcctggcgcacaatctcttcctggttgacgagtgcttttgccttctcctctgcgacgcgcacgatggtctccgcctcgcgctgtgcctcgctgatgatctgggcacggtctgcgacgatggccttcgccttgcgcacttcggacgggatcgcctcgcgaatctcatcaaggatctgctttgcgtcttcgctatctataaacgatttgccgcctgcaaaaggaaggtgccagcctttctccagtacgtcggtcaattcatcgatcaaatcttctacggttgcctgcgtgttgctcataaaaaatccattcctttcgtatttttagccgcattcagtctgccgtgcggcaaagtctctgatttattttctctaaaaggcactcgggcacaaaatgggaaatatcgccgccgaagcccgcaatctgcttgaccatgctggagctgaggaacatgtgctcaatgctggtcggcaggaacagcgtttcaaactccgggttcagctttttattggtgagcgccatctgaaattcatattcaaagtcggagattgcgcgcagacccttcacaatggcagccgcatgcttttcgcttgcgtaatccgccaaaagaccgcgcacgcagtctatctctacattttccatatcggccgtgacggtgcgcagcatttccatacgctcctccaccgtaaagctcgcgcgcttatccgggtttaccggcaccgcgacgatgactttgtcgaaaattttgcacgcacgggagatgatgtccatgtgtcccagcgtgaccgggtcaaagctgcccggacagatccctattctcattgatataccgccttttttgcgcttacaccatgctttgatggcgatacgcggtcagcaagatttttccgtaacggtagtcgcgcacgcgcacgaattcccctgccgtctccggcagctcttcgtccgtggggtgctcgcagatcacgatgccgccgcggttcatgtgcggcgtgaccgcaaggagcgcctttgtgagcgtgcccgtgcggtacggcgggtcgagaaacgcgatgtcgaaggtctcggtgcagcgcagcagatacgaagcatactccgcgttcatcacctgcgcttcgttttcaaaccctgtggtgtggatgttctccagcacgacgccgcaggatgccttggcgctgtctacgaacacagcgcgctttgcgccgcggctgagcgcctcgagaccgatctggccggagcccgcaaacaggtcgagaaacacgcggccctccagatcaaactgcaaaatgttgaaaagcgcctcttttacgcggtccggcgtgggacgcacagcatcgcccgggagcgttttcaattttctgcctcggcgggaaccggttatgatacgcacagccgaacactcctttctcttttggaagtccgtgtccgaaatctaaaaaacatgtacggacacacttcaagttattatctcatttgaatagaaatatgtcaaccgtttttgcgcagtttttgcagagaaacgtcgaaaaatacgcaggaacaacgttattccccgtcgttttcttcgctgtggaaataacggtagacggcgcgggcggcaggggcgttcatgccgggcgtttcctccagcatttcctccgtcgcctcgctgacggcgcgtatggttgtaaaatgcttcatcagcgctttggcgcgcgtttcgccgatgcccggaatggacgtgagcgtggtggagatggtcgcctttttgcgctgctggcggtggtagccgatggcaaagcggtgcacctcgtcctgaatgctcgacaccagcgtgaacaccgcgcgcgtagactgaatggcgatttcgccgccgtcctccgtgatggcgcgcgtgcggtgcttatcgtcctttaccatgccgtataccggcacgtcgatgcccatttcgcgcagaagcggacgtatggcgcccacgtgccctttgccgccgtcgagcagaatgagatcaggcagtctgccgaagccctcgggcttatcggcggcgcggtattcttcaaaacggcggcggatgacctcgcgcatgctgccgtagtcgtcctgtccgacgacagtcttgattttaaacttgcgatacgcgcttttcagcgggcggccgttttcaaacacgatcatacccgcaacgttctcgccgcccgcaaggtttgaaatatcgtaggattcaatatattccggcgctttgggcaggtttaagagctggcgcagttcatcgagcgcggaggtctcacggcccgtggcgcggcccatagcctgcgcaagcgcttccgcggcgttcgtgcggcacatttccacaagctgcttctgttcgcccttttgcggaatgtggaacttcacgcggcgctccgcctttttcgtcagccattcttcaaggacgccgtcgtcgttgacggggccgtctatcgtgatgacgggcgggatcttatcgcgcatcgaataatattgcatgacaaattcgctgcggatctgctccggctcatcgtcggcgtttaataaaaacgattcgcggtcatacagtctgccgcccgcaaagcggaacacctgaatactcaccttttcgccgccgagcacgagcgcgatgacgtcctgttccggcacgcggcttgcgacaaccttttggcgctctttcagcttgttgatggccgtaatgcggtcacggatgcgcgcggcaagctcaaaatcgagattttcagccgcctcgttcattttctccgtcagcgtgcgcacggaatcgcttgtgccgccgcggatgaaatcgagcgcctcctgcacggcctcgttgtattccttttggctcacgtgcccgcggcacggagcacagcactgcttgatgtagtagttgaggcacggacggccgcggccgatctcctgcgggaatttgcgcgtgcaggacggcagacggaaaatcttccgcgcctcctccacggtgtccttgattgtccacgcggaaaggtacgggccgatatactttgcgccgtcattcaggacctgcttcgtctccgaaatgcgcggccagtcgcccgctgtcaccttaatataactgtaccccttatcgtcctttaagaggatgttgtacttcggctggtgctgcttgattaaactgctttccaaaatgagcgcttcaaactcgctgtccgtcagaatatactcgaaatactcgacattcgagaccatgcggcgcaccttttcattatggtttttatccgagccgaaatactggctgacacggtttttaagcgccttcgccttgccgatgtagatgatggtatcatcgcggctgtgcatgatgtacacgcccgggtgaagcggcagcttcatcgcctttttgcgcagctctttgatatgcgccattttttcttccgtaagctgtaccatgcgcacctccatgcagctcagtcactaagcgactgagaaagaagaaacgcctaccggaaatgctccgataggcgccgttttgacaagctgaaattattcggcaaagccggattcaacaagagccacgaggctgtcaacagcttcctgctcgtcggaaccatcagcgatgatgtcgatcgacgtaccgccgacgatgcccagagacagaacgcccagcaggctctttgcgtttacgcggcgctcatccttctcaacccagatggaagacttaaactcgtttgccttctggatgaagaaagttgccggtcttgcatggagaccaacctgattctgaaccaaaacgtccttcttaacacacattgcgattcactctcctgtaagtaatacattacatactctgaatgtcaaacatgattctaaagctcaaaatgcttcaatataagttattatagcataatttgtccccccgtcaagcggggtaccccatttttggatatatgcccgtggcatatcgctatgaaacgatccgtgtttgtgcattttgctctgcttgttgaaaacatttcgtaaaatcagttcgccacagagggttaaacattcccaaaatccgcttattttctgccgaaagcgcgcttttcttccgcagtcagctcagctttttcaaagaggtccgggcgggctttctgcgtgaccttcaaagattgttcgcgccgccattttttgattttttcgtggtggccgtttaaaagcacctgcggcacctctctgccgcgccaagcagagggacgggtatactgcggatattccaaaagcccgtcataatggctttcttcctcaaagcacacgtcttcggaaagcacgccgggcagcatgcgcgccacggcatcggtgaggattacggcgggcagctcgccgcccgtcaggacaaaatcgccgatggagatttcttccacgtcgtattcctccaaaacgcgctcatccacaccctcataatgcccgcaaagcacgatgatattctcgtttttggcgagctccttcactttttcctggtctaagacccgtccgcggggggacatatacacaatatgcgggcgcacggcggtttgttcgatgatctcgtcaaacgccttcgctatgggctgcgccatcaaaagcatgccctttccgccgccgaacgtgcagtcgtccacgcgcttgtgcacgccctcaccatggtcgcgcagctggtgacagcacacctgcaaatacccgcgtgcgcgcgcacggccgatgatgctctcgttcaaaatattctcgcacatttcggggaaaagcgtcacaatatcaatccgcatccgctgcctccccggcgtttacgggcacggtctccgcgccgtcgccgaaaatacccggaatgggctttacaaacagctttccgctttcaatgtccgtcttcgcgatcatggcgtccacggcggggaacagaaattcctcgcccgcgccgtttacaatgcggtacacgttgttcgcaccggtctcgaaaacgtcctgcaccgtgccgtattccgcgcccgttgcgtcatcgatgacatgaaggccgatgagatcttccacgaagtagcggtttttcggcaggcgcacgtcgtttcggtcaagatatagaattttgcccctgtacaggtcggcctgtgtggcgctttccacgccctttaagcgcaccagcaaaaggcttttgtgtacgcgggaagataggagcccggcatccgttttgccgccgtcaaaatacagggtcttcacttttttcagaaaatcggcggaatcgcaccacggttccacgcgcatttcgccgcgtacaccgtgcgtacccacgatccttcccgcttccagaaattgttttttcatgtgttttcctcggctctgccgcagcgaaagccttcctctcttttaatataaaaaggacgcacgaagcccgtgcgtccctctttcgatcaatcgatctcaacaacgaccttttcgctgctgcgtgttgctgcggcacgcataacaacgcgaatcgctttcgcaatgcggccctgcttgccgattactctgcccatgtcctcttccgcaacgtgaagatgatagacgacggaaccgtcttccttgggctcatcgagtgtaacggaaacctcttccggcttttcaacaagaccctgcgcgatgattttcagtaattcctgcataagattgttcctttctcaaacgagaagacgggcaatcagataacaccgtgcttcttgaacagtgccttaacggtatcggtcggctgtgcgcccttttccatccaagcctttgccttttccggatcaacctttacaacgctcggctcttccatcgggttgtagtagccgatttcctcaatgaaacggccgtctctcgggtaacgggaatctgcaacaacgatgcggtagaaaggagccttcttagcacccattctgcgaagtctgatcttaaccatggtaatttcctccatattataaaaaataagttttatctattaaccaacgattcgtcggcaatatttacaatttaaatatacgtcttgcgtcggaaacaaatgaagttcgtttctttatcgcatttacattgggaagccgcccatgccgcccatatccgggccgccaaaaccgctcatgccgcccatacgcgccatcattttcttgccctttttgccgccgaactgcttcatcagcttctgcatctgcttgagctggttgcaaagacggttgacgtcttccaccttcatgccgcagcctgccgcgatgcggcgcttgcgggaagcctgcaaaagctccggctttgcgcgttcttcgggggtcatggaaaggatgatcgccgcgttgcggtccataatgcggtcgtcaatgtccatttcatcaagcttcgagctgttgatgccgggcaatttcgagaggatgccctttaacggacccatcttcttcacctgctggaactgctccaagaggtcgttgaagtccatcttgttctgcatcatgcgctctgcggtacgcgccgcggacttttcatccattttcgcctgtgcgtcttcgatgagggacagcacgtcgcccatgccgaggatacggctcgccatacggtcggggtggaaaacctcgaggtcgtcaatcttttcgcccgtgccggcgaacttgatgggcttgccggtgatggccttaacggaaagtgccgcaccgccgcgggtatcgccgtcgagctttgttaaaatcacgcccgtgatgtcgagcaggtcatcaaacgactttgcgacgttcacggcctcctggccggtcatggcgtccaccacgagcagaatgtccgtggggttcaccgcttcttttatatttttcagctcattcatgagcgcttcatcgatctgcagacggcctgcggtatcgatgatgacgtaatcgttgccgtagtcgcgcgcgtggcgaacagccgcctgcgcgatcttcaccgggtcttcggtgcccatctcaaagacgggtacgccagcctgtgcgcccacgacctgtaactgcttgattgccgccgggcggtaaatatcgcctgcaacgagcaacggacggctgccgcggcttttcagcattttcgcaagctttgcgctgtgcgtcgttttaccggcaccctgcaagccgcacatcatgatgacagccggcgggtgtgcgggcattttcagccgctcttcgctgccgcccatcaaagccgtcagctcttcgttgacgatcttgatgaccatctgcgcgggggtgaggctttccataacgtcctcgcccacggcgcgttccgtaatacgcgcggtaaagtcctttgcgaccttgtagttgacgtcggcttcgagaagcgccaaacgcacctcgcgcatggcctccttaacgtcgctttccgtcagcttgcctttgctttttaactttttaaacgcgttgccgagcttatcggcaagaccttcaaacgccatgtaaaaatcctttcagagccgcgccgctcagtccgtcagcttctttgcggagcgcaaaatgctctccacgttctgccgaatgaccggatcgccgccgttcttttcgttttccgcttcgatctgtaacgcgtggtcgcagatctgcgtcagttcttcctgcacgctgcggaagcgctttgcaagacccagccgttcttccatttcaagaagctgctgttcggcgcgcttaatgccgtcgcgcacgccctgccgcgtgatgcccttctcctctgcaatctccgctaaagaaaggtcttcgttataatagcattccacgacctcgcgctgcttttcggtgagcatgtcgccgtaaaaatccagcaggaacgtgatgcgcagatcctttgccatagttcgctccgtttccgggcgtttccaatttcaagcgccctgctgtaaagtttttttctttacagcctttgtattatacaatagctgccccgctttgtcaagcattttcaccgtaaaaatgcgcccgttttcggcactttgcgccgcaatataaaaagaaggcagagtggtattttctctgccttctttgctgtattgagttttaattttctaatattgttgtccacacgtgccagaattcagattgagaacttgagaactaatgatttctcatcaaaatctttttgtaattaatcagaatcaattacatctacttctgttaatcgatatgtttcgcgcaagtgaatgcccaaatcctgaatgcaattatattttttgccaggctcaaccattccaccaaaatactgcacccaattgcccaagtcaattacgatctctgttgggctgttaatctcaaatactgctgtctgaccatgttgtccttgccacaatattctttcatccgcagtttttactgttgctttgcgtgatgaaaacactccaaaataacccaactcaatattaggcaatctaattttaacaaccttacttgctttaatttctccaatcgggcaaccacaactcgggcacgattttgcgaagcttgaaatttctcttccgcattcaggacacttaatcaatgccataacagcaccaccccataagctatttttggtatttatataatatctcattttgagataaatgtcaatatctcaaaatgagaactctaaaattaagttaaatcaacggaattttggaggtatccttatgcgtcttcgagacctgcgggaggatcgcgacttaacgcaaaagcaggtggcggatttcctctccatcaagcaaaacacgtattcgcagtacgaaaacggcgtgcggcaactgcccattgacctgctcattcgcctgtcgcggtactacaccgtttccaccgattacatcttagagctgacaaacgtgccggagccgtaccctcagaaagcaaaaaggccctgatttttgcataacgtatgctttacaaacccagttttgcatggtatatttattcgtatagcgcaaacgggtgcatttttgcaagctcactcgtctgtgcttgcattcagttccgttcggcggagattgtctctgtgcggcgggatacggaaggaagcgaaattttgatttactttaactgtgattacaccgaaggctgccacccgaacattttaaagcgcctttgtgaaacgaatatgatgcagactgtcggctacggcgaggacgaaatttgcgatttggcgcgcgcgaagatccgcaaagcatgcggtcgcgaggacgtggacgtgcattttctcgtcggcggcacgcagacgaatgccaccgttattgcagcgattcttcgcccgcaccagggtgcgctgagtgcagacaccggacacatcaacgtgcacgagaccggcgcggtggaagcgacgggtcacaaagtgctgcctctgccctccaccccggacggcaagatcaccgcagaacaggtggaaaacgcctatctggcgcacgtgaacgatgcctcgtttgagcacatggtgcagccgaagctcgtttacatctccctgcccacggaaaacggcgggttatattccaaagcggagctgaccgccctgcacgatgtctgcacgcgctgcgggctgtacctctttattgacggcgcacgtctcggctacggcctgacggctcccgaaaatgacgtgacgctcgcggatctctgcgcgctttccgatgtcttctacatcggtggcacgaaggtcggtgctttgttcggcgaagcggtcgtaatcacgaacccggcgctcaaaacggatttccgctaccacatcaagcagcgcggcggcatgctggctaagggccgtctgctcggtattcagttcgacgagcttttcacggacgatctttatttcaagatcagcgaaaaagccgtgcggcaggcaaagcgcattgcaaaagcgtgcgaagatgcgggctgcgcgttctttgccccctcgccgacgaaccagcagtttcccattttcccggatactgcgctcgaaaagctcgcggaaaagtacaagtattcctattgggcgcgcgtggacgaaacacacagcgccgtccgcctttgtacaagctgggcgacgacggacgaaaacgtggacgcactctgcaaagacattgcgtccgtcatggcagaataacgccggactgcggctttctgccccgtttagaggagaaaaacccgtatgaagttatttgaagaactcacccagctgcacggcgtcagcggctacgagaccgccgttgcagactatattaaagaaaagttagtcccgcttgctgacgacattaccaccgacccaaacggcagcgtcatcgcctattttaagggcacgggcgagcacaaaaagcgcatagagcttgccgcccacaccgatgagatcggctttcaggtcattaaaattgaggaagacggccgcattatgtttaaggagctcggctgctgctggacgtttacaacgtaccagagccgcgtccgcttccgcaacggcgtggttggcgtggtcgcaagccgcatcccgccggaaaagctgagcgccggcggctataagcgttataccgattgctacatcgacatcggtctgcacagcaaggaagaagttttaaaatacgttgatgtcggcgacgttgcatgctatgagggcccgtacacggagcttgcgccgggctacatcaccgcaaaggccatcgacgaccgcgtcggctgctatatgctgctggcggcgatgatgaacgtgaaaaagccgaagaacgacatctacctcgcgttcaccgtgcaggaggaggtcggcacgcgcggcggacaggtcacggcgcagcgtattcagccggacatcggcgtcgcggtggacgtcaccccgtgccacgaccgcccgggcgatttggagggcagcaacgcgctcgaccacggcgtcgccatcaaaatctccgacaccggttccatcagcgacgaaggccttgtgaataaatccatcgcgctgtgcaaagaacacaacgtcccgtaccagaaagacgtcatctatgtcggcggcacggacgcaggcgccatgacgctcgtcggcggcggcatcaaaacgattggcttctcggtcgtcacccgctacacccacggcccgaacgccatcgtgagccaaaaggacatcgaagcgacggtcaaaatgctcgagctcttcatgaacgctgatttcgagtaaatttaaaagcacataaaatcagcggcgcacagagttttcacaccctgtgcgccgattgttttgtcttaatatcctgcttccagcttcggcaccgcaacaggcttaccggggtcgctgaaatcccagtgcatttcgtggcgctcgaagtagccgatgaccttaccctcgtcgtcgcgtgcggtcacaaaaaatcacctcacacctcatacggatgcgttcaaactcgattttaaaacctccgtattcagttctttgaattccatcattcttcctcctcatactccacgtccgggcgagtgatggcgatcggcacgccgttcacctgcacgcccgcgccggcgggaatgaggatgtacggtgcaccgtcaatgtagcgcgtctcgatccactcgctgtactcggggtcgacgcgaatttgcacctccggcgttttgatctcgaatttcttcgtctccacaaggttgcgcgggctgagtgccgcgtccgcgccgaactgctccgcgcaggcttcctcaaacttttcggctttctcgcccggcacgccgcaagcggtcagcatcgttttcatcgtacgtcccgtaatggtcagcggctccgggtccttgctcgccttgtgctcctcaatcatcccgcaaaggcggctgtgcacggtctgtacgacgtctaaactgcacgcgtcatttaaggcatcgcccaaaatcgtgccaaacgtcgttttctgctcctctgcgggcatgggcgcttcgcggttgaacaccgcatctataaattcatcgtagctttccgaagcgctgcggcagtagtacatggcgctgtaaatatcggcgctgcggtcggtgaacgacgggaacaaaaagcccagctgcggcgcggaaacaatccaatcgatgtcgcggttgtggaacgtattttccggcacgtcgtaccccaaaacgggctttgtctgcttcacggggcagacggtacacagaacgtaattatagatattctccgaggcgtcctccagcgtttcgccgtcctttgcgcggtacggcacgtcgtatgtatcgttcgcgagcaaaatgagatacgtaccctcgggtctgtatgatgcgatgaccttctcaaaaaacatccgtacggcttcttcatcggtaagctttgagtcgcgcagcgccatcagcagccggtgctcatcgctgtcaatgacctgcgcagtcgtaaacggcatttcgatgagatttttgccgagcgtgccggaaagcgtacggcgcagcacggaaagcatattttcgcattcctcctgcggcagcagggagagcggctggtcgaattgcgagacgatttcctgcttttcgttgacgtagcacccgcgcacatgggtgatattgcttttatccgccctgaatcggcggcgaatttccgagatttctttttcgttcattttgatatcctcttattctaaagtctaaagagtttcgagctctgcagagctcgaccaagggcgctgcccttggattccgccgcctttgaaaaggcgggcgaaacttttaaccgccgttgccgcgggctgtgcaaaactttgctatatcattttacccgtttggtgcacacctgtcaattcacttctccgtcccaaaaccgttgcgcgcgcccaaaatctgcggtaaaatgattttataattttgaattttctccgaaaggattcttagtatgtccacctcacaacctacccctgtccgcgggcggttcgcgcccagcccctcggggcgcatgcaccttggcaacctctgctgcgcgcttcttgcgtggctttccgtacgcagccaaaacggcgagatgctcctgcgcatcgaagacctcgaccccgaccgctgcacacgcgaaaaagccgagcttttaatggacgatctaacatggctcggcctcacttgggacgaaggccccggccatgagcgcacccacgccccctactgccaaagcgcacgccgcgagctatacgaatcagcgttaagtgaactccgcgccaaaaacgatgtttacccatgcttttgcacccgtgcggagctgcacgcggtctccgcgcctcatgcgggcgatggcacgttccgctaccccggtttatgccgaaatttgacgcccgccgaagccgaagaaaaaagccgcacgcgccgcccaagcttgcgttttcgcgcaccggataaatccgttacatttgaagatctatactgcggcccgcaaaatataaatgttcagtccacgttcggcgatttcattgtgcgccgcagcgacggcgtgcacgcgtaccagctcgccgtcaccgtagacgatgctttaatgggcgtgacggaagtcgtccgcgggcgtgacttgctcccttccaccggctgccaaattcagctctttcacgcactcggccacacaccgccgcactacggacacattccgctgctcgtcaatcgcgacggccgccgtttaagtaagcgcgagcgcgacctcgacatcggcgttctgcgcacgcgtttcacgcccgaacaactcctcggccgcatggcaaatttacttggtttcctcgaccgcccggaaaaaatcaccttaacagagctcatcccggtctacaaagcgtggtatgaaaccgccgacacgccgaaatttccgaaaaattgcgttgttcccgacaatttcgccataaaatagcccgcaaatttttcatcgcatctcgcagcttcacggacgagggcaaaacgttgcttgagcacccgcttgacaacagcacaaagtgctactcgcagctcgactgcggctgggcacagaacggcggcggctcccccccttcgttcatacgcacgaaaaaaggacttcttttcggaagtcctttttgctgtctttaagttgtttacgccgctttcttatgacgtccatgcttttccataaacgccggcaacgcttccatgccctgcggcgtaacggggcgcacccatttgccggagtacatgtgccgctgcatcaaaatgagacggatcggctcgtcgatatagcagcacgcaaacacgataagaaacggcgctttccacacaaggcccgtcaggcacaccagcggcagcaccatcgcgtacataaacgcaatttcgcggattgtgccgaacgccgcgtctcccgcggctctatacgtatcgttctgcacccagttgcacatgcgaataaccgccgccacgcagtagatcatcagcatgtgtgaaccgatctccatcgattcgccggaaagactcatcgcggaaagcagcggcttgtggataccgagcagcaccagacatacgcacaaaatcgtgctgccgcacaggaacacaaggcgttttgcgcgctcgtaggctgcgtccaactcgccggagcccacgcatgtgccgaccaaaacggaagccgcatttgagaaaccagcaaagaagctgataaccatgccctccagcgtgcggaacaccgcgatggccgcaatggcctgttcggattgtctgcccaaaacaacgttgataaccatgttgcccacgccgatgagcacttcgttgcagatgatggggaagcacttgacgaagtagattttcacctgcttcttattccagcggaaatgctttttaaagtggaacagatacgggtacttctgtgcacgcgccaaaatcaaaatgaccaaaacgttgataaccgccgccaaagatgttgccagcgccgcgccgcgcacgcccatctccggcaagccgaactttccgtaaatgaacacccagttgaggaaaatattcgatgccaccgaggcgattgacgcgaacagcgggatgcgcacgcgctccgtagaacgcagcaaagcgctcatcgccatggaaaacacctgcacagggtaaccgaatccgatgatgcgcagatattccgcgccaatcacctgaatgttctccttatccgtatagagcttcatgacggtttccggcgcaaaaatcgcaaacgcgccgaatgtaagccccacgatcatcatgcaggtcagcgtcaggccgtaggaatggtcgatgccgtcgtcatcctgcgcgccccaatactgcgagaaaaacagcatgccgccgccgaaaaagccccagtagcccgcaaacatcagcgaggaaaactgtgcgcaaaggcccaccgcgcccacggtcgtttcgcccagcggcgcgatcatcatggtgtcgatcatgctgccggtcgtcgtcagcatgttctgcaaagccaccgggatcgcaatgatcgcaaggtttttcagaaattgtttccacgcaaagcgtgtcttcgttttcattgtattttctccccaaaactctaaaattcggcccgcgaacccctcagtgccgcttgtgaatcagtataccgtatttcgcgacaaacttcaatccttattccgccgaatttccctgctttttataacaatcccgacatgttttcaaccgttttaaagcacgcccacaaagcaaaaattgaccccctgatacccataaagcaatgacggaggaaatgtcggcttcatgggccttcagggggtcggcaagtgtagcttgtttattttgttgtgcgcagaggctttacttcttcggctgaatcagcgggtggaagcacatgacctttctgacatcgttcagataggtttcgcccgggcgcgattttctgcattcgtccgtcgcataggggcagcgcggtgcgaacttgcagtaggtgatggaatattccttagactccatatccggcaacgccatgtcgtcatccgcccacttgtcgccgatacgcggcacagcgctcatcaaaagctccgtgtacgggtgtgcaggctcgtccatgatctccttggccgggccgtactcaatgagacagccgcggtacagcgttgcaatgtaatcggatacatagtacgccgtggaaaggtcatgggtgatgtagataaaggagaccttgtacttatccttcagctccttgaacaggttgacgatgttcattttcatggaagcatcgatagccgcaaccggttcgtcggcaatgatcagcttcggacgggtgataagcgcacgtgcaatggaaacacgctgcagctcgccgccggagaactgggtggggtatttgccctttacgaccgccagagagagaccgacgctcttcagggcgtcatctacaaggtttgtagcttctgctttgtttttcgcaatgccaaggcgcagcgccgtgttgaacaggtaagagtctaccggcttacgtgcggagaaagactcatacgggttctggaaaatcggctgcacttccagcttgaactgctttgcgttgtagcttttcttatcgcggtaagattggccgtccagcacgatgtcgcccatatccgggttgtgcagacgcagaaccatcttacacagtgtggacttgccgcaaccggattcgccaacgacggagaggatgaccggcttatcgttgtcgatggaaagcgtaacgtcgtcaaccgcaacaagctttttgccacgaatcataccgcctacgcggaagattttgctgacgcccttgatttcgagcaatttatcagccattcttctctccctccttcttcagcaaatggcaggctgcaaagcggcccggcttaacttcaatgaactccggaatctcctgacggcaacgatccgtagcatgcgggcagcgtgctgcgaaacggcatcccggaggcgggttcttcagtgccggcggacgacccggaatgccgaccttctggctcttatctccaacgcgcggcagggagtcaaccagcatcttcgtgtacggatggatcggatcattaaagatcgcatcggtcgggccaagctcgatgatgctgccggaatacatgatcgccatgcggtccgtaatctgataatgcacgcccatatcgtggctgacgataaccatggtgttcttgagttgcttctgcaagcgcatcagcatcttcaaaatacccttctgcacaacaacgtccagagcggtggtcggttcgtcggcaagcacgacattcggggacataaaggtcgcaagcgcgatgataacacgctggcgcataccgccggaaagctggaacggataagattccaaaatatccggggaaagattcagctcctcgaggtattttgcaacacgtgcgagggtctgctctttcgtttcgttcttgcggtcttcctgcgggatagaatccaaaaactgctttttcaggcgaacgatcgggttcagaacgctctgcgcggcctgcggaacgtaagaaatgttgttccaccaggtcttctgaatgtttccggattcataagaaaaggattgtccattcttttcgccgctgaggataaccttacctttgtcgatctccagcgggaactcgataatatcgtagagggtcttcagcagtgtggtcttgccgcagccggattcaccggcgatgccgaatatctcgttatcgtggatctcaaagttcaggtcgttaaggacgtgaacgtcaccgtcgatgagcttgtaagaagtggacagattttcgacttttaacatattcgttacctgcctctcttcatggataagtaatcgttatagcccgtaatgagtaagaacaggccgacaaacagaataaccgttgcaacgatcggtgcgccgatccagagatactgcttgttgaaaattgcgttgtagcttcttgcccactgaatcatgttgccgagggagacaaggttgccgggggaaagacccagaacagcaaggctcgactcggaaccgatagcggaaagcgtagcgttcataaagttggagagcgaccaggtcagcgcatacggcagaatctcggtcacgacgatctgcaccgtgctttcaccggagaacttcgccgtgtggataaagtcgcgctctttaatgctcagcgccatggaacgaatctggcggctcggccaagcccatgcgaacatggcaagcacaagagccatcacgatcgtggtggagctgcccttcatcagggaggtcatcatgatgaggatcggcagagacggaataacaacgaacgtatccgtaacaatcatcagcacgcggtctaaaaggccaccggcaaaaccggaaagcagaccgacaaaaacaccgacaaccgtgccgaggaatgccacgatgagaccgatgacgagcgagttgtggatagcttcaatcagcagccacacaacatcctgacccatactggtagtgcccagccagtgttctgcggaagcacccagcttattcgggtaggtattgaacgtgaacgggttcacgtgcggtacatagtaaacaacgaaaccgatgataaagaatatcagggtcacgataagaccgaacttcaggcggaagttggctgctttccaaaattttgcaaattttttcattacaacttccctccttatcaaccgtaacgaattctcgggtcgatgaacggatatataaggtcaacaaccaacgtcgccgtggaaatcgccacgatggaaatcgtgatacatccgaggatcatgttgtaatcggactgcaaaatcgcattttggatcagcgtaccgacacccgggtaaccgaagatgatttctgtcatgatggaaccgccgaagacgccgccaaggctcatggccaaagccgtaatctgggtcaggatggagttacggaaaacgtagctcgcaccgatcttcgcttcggaaatgccgcggtaacgtgcatataaaacgaagtcttcttctgcagtcgtgccggcaagggacttcatagagataatccaccagcctgtgccgagcagaagcatggagatgcccggcagaacagacgctttcagaagcgaaccgagccactgtgcgaacgtgccgcgggtaagcagcgttgtctggattgggaaccagccgaggacgaacgcgaagacaatctgcagaacaagagcgaccaggaagtacgggatcgggtaaatgcagatcgcgatgccttcgaggattttagaggatgtcttgttcttacggaaacctgcaagcaaaccgatgaagttgccgatgatccatgcaagcagcgtggtggtcagggacaaaccgagggtgtacggcaggttacgaccgataatagaggtaaccggctccggatagctcatcaaagacgggccaaagtcaaactgtaaaaggccatgcagcaggaagtagccatactgctcaagaagagtgccatcgagaccgaattgaattctaagttgttgacgtagcgcttccatttctgccggatccatgttgccggaacgggattgcatctgggcgatcatgttctcaacaggatcggaagggaacatacgcgggatgaagaagatgaacgtaacgccgatcaagatcgtcaacgcccacgcaaggatacgctgtaaaaagaatgttttgaatttcacagccacacttccttatcttatagacaaattacaacaggatattctgggaaatgagaaagaggatgacggacgtggtcatgggtattcggcacacgccctcatcctcttcagatcatttcagattagtgctattggattctctccaagtattcaagctatcaaattagccctgaaccggctgaatgaacggcaggtcatacttgaagcggctccaccaccaccacggaccgtcatatgcgttctcggcgttcgggtagccttcccaatatgtgctgttggtcggaacgaactttgtaccgctgaggaagttgattgccggcatttccttaacagcttccttcaggaattcctgatgcagctcataggatttgtcgctggtcggatcaacgcctgcgagttcggtaaggatctcgtcaaccttctcattcttccaacgtgcgccctgaccggaaccggtctcgccgagcggcttcatcagacggctgtcccaaccgctgatagcggagtagaagtccttcagaataccagcggacggccagtaagtgccgatctggtagttgccctgaccaccgtcaacgtcccaagtagcagtactcttggaagtaatggtgcaatcgaggccgaacgcctgcagctggttgtaagcagcctgagcgccgcgagcggactgagcttctgtatcagcaaggtagctgatttcagttgtgaacttggaaccattgaagtaccagccgtcgtccttcttctcaaagccggctttgatgaggagcttttcagctgcttccggatcgtgcttccaccagcctgcgccgaacatatcgatgagctcttcgtcggtgccggttacgccggtcttctcagccatgcgctttgcatagccggtgtcgtacggcttaatggtggtgccatcgccaaggtcaagctcaaagttctcaagccattcctgcatcgggatggtgtatgtatcctggagatactgggtgttgttgagcagcggaatcggagccgcacggcctgcgccggagaagatgttcatggagatctggtcgatatccagtgccagaacgatagcccagcggaagtcagggttgtcgtacggagcgccctgaccctgagagaacaccaggccctttgcgcccgggtcgtccatggttgcatacgggaactcgttgtaccatgcgttgatcttgtcgttagagctctgcattgcctgcagctcttccatcgtaacttcgcagaggatatcaacttcgttgctgaccatctgcatctgtctggaggaggagtcgccaagataacggaaccaaacatattctgccggaacctgatcttcgctgtagttgtagtgctctgtgcctacaacgccaagcgtactttctttccagtcgtcacggagcttgtagaggatccagtcgccgttggagtcatagtcttctacggtgtacgggcctgctacaaccggctgctcgtccttaaaggtcgtaacatcagcctgctgggagtaaatgtgctcaggaacgatgcggtaatcggtgccccatacggtgatgccgtaacgctgtgtaaagcgcgggaaggattccttcatcgtgaacttaacggtgtaatcgtcaaccttctcaaccttatcgatgtagaggttggtcgctgcggaagcaccgatcttgtcgttttctttgatcatgttgaacgtgaagacaacgtcgtcagcgttcaggtcttcaccgtcggaccacttgatgccttcgcggatcttaacggtccattcggtaaagtcttcgttcggggtgcccatatcggctgcaatttcagggaactgctcaccggaaacggtgtccatttcccaaaggtgtgcgctcatcagctgatgaataccgaagttcatgttcgtaccggacatgtagctgttgaactggcccggagtgtcggtcggagacgcagtctcaacgatcagagtttcgtcacggttcgtgccaaccgccgtaacctgacctgcggcggcattcgtgccggagccggtagattcggaagcagaagactcacccgcggcgctgctggtgctgtcggtggagccggaggatgctgcactgcttgtgctgccgccgccaccgcagccgctcaggatgccggtgacgagcatggccgccgacagaagaacagctaaggtctttttcttcataatacaatacctctcttgttttgtgaacctgcggttcataatgtgttgaggtcacaaagcataccccactttgtgatccccggtgttttgaattcctgcaaatcgcaaaatttgtaggaatcccgccatgaactttgctttgcaaaattcatgaccccctatttatcttacagcgcttgtccgttcactgatgtacctttccccacacgctcgcctttttagcatccggtacgacgatgtgtgcattccgctgaaagcggcggtatttagaacattcaaacgctgcgatagcatcggtctattgctccatagccgaagaccaacgctaataaatagctttaaactgtagagctaagtgaaaaacaaccaaattttaattccgttctcgcttttttatgtacatagaatagcaccgtgttcacgatttgtcaataagttttcaaaaacttttcagtattttttccaaatattttttaataatgttacttttataatgccatatacaacaaaaagtgcattttggggagcaatgtgaaatcggtttcccattttaaaattatgtaattttaatgtgcttatatgcttttgtacattttgatattttaaggcgcacaagcctgcgctttatagtcattttcaatagtttcaattacaaacatttcgttttcatccgctactcgttctaatttcatcaatattatgtttactatttctatttattttaaaccaacattgtctatactgtcctacagcacccgaaaaaagggttaaaaaacggctgccgcacccggcacaccgttcttttcaccctatatcctttgtcctgtggcttatactctgttttataggtctccattctatacacctatattcttataagtgtacatttcggcgactgaaaccgtttcggcatttttaccaccgacttctctgaattcaccccggcaaacgagcaccgcagtatagaaaacttaacgcatgtttggaagctaagcgcccagctttcccctttatactccaaagcacaattttcactatttttctcaaacacttttcaaattcttgtaaactgtgttataatggtaaaaatacttggccgaaaggccgctttgcgcaatatacatggatattgcacaggaggtaaagttgtatggaacagaaaaaagattgggtgaaggatcttatcgtgtatcaggtctacccgcgcagctttcaggattctaacggagacggtatcggcgatattcccggcattttaagccgccttgaccacctttcggcgctcggcatcaacgcgctgtggctctcgcccgtattccgctcgccgaatgacgacaacggctacgacatctccgggtaccgggagatcatggacgagttcggcaccatggaagattgggacgcgctgtgtgcagagtgccacaagcgcggcatcaaggtcattatggacctcgtcgtgaaccactcctccgacgagcatccgtggttcctcgaatccaaaacctcgcgcgataacccaaaaagcgactactacatttggcgcgacccgaaaaacggcaaggagccgaacaactgggcctccgttttcggcggcagcgcgtgggaatttgtaccggagcgcgggcagtattactaccatctgttctccaaaaagcagcccgaccttaactgggcaaaccccgcgctgcgtgaagaaatcttctccatgatggaatggtgggtgaaaaaaggcgtggacggctttagagtggacgccatcagctaccttgataagccgcaggatttcccggattccgcagagccgccgcagccggacggctattcgttcagttcgagtctcatcaacggtcgccccggcacgcacgcctatatccgcgacatgaaccgccgcgtgttctcgccatataacgtcatgaccgtgggcgaagtggcgtcgaaagacgccaaggagctcgcccgctacgtcaacaccgaccgcgaggagttcgatatggccatcccgttcgtcgcgccgatcgtcgagatcaacacgtggtcgccgaaaaaaatgaagcaggatattcaaaacgactacgacgccttaaaggaaaacggctggtgggcgcggtttttcagcaaccacgataagccccgtcaggtctcactctacggcaacgacaaggaatactgggaggtttccgccaaaatgctcgcgatgctgctgcactccctgcccggcacgccgttcgtgtatcagggtgaagagattggcatgacgaacatgcgcttcccgcacattgaagattataacgaccccgatgcaaaaaacacctaccaccagcacattttggcgggcgacacgccggacgcggccttaaaagaggcgcagatgatctcccgcgacaacgcccgcacgccgatgcagtgggacgcaaccgaaaacgccggcttcacgacaggcaagccgtggctcggcatcaacccgaactacacaaagattaacgcggaaaaccagaaaaacgacccgcactccattttcagctgctacaaagcgctcatcgcactgcgcaaaagcagttccgcgctctcacgcggcgacctcgaaattccggaaaccggctccgatacgctgttcgccctaaagcgcagctataacggcgaaactctgctttctttccacaatttctccgccgaaccgtcgaaaatccccgccgcgctcgttccgcagaacggcgaagtgctgctctcctcctacgaccgcgagggcggctacaccggccccaatctgcgcccgtatgaatcggtgattttccgcgtataacggaggtgcagcatgacaatcacgggttaaaaatccatgcgaacacaacctgttatgctgtttttcccccaaaaatgaaactatgcgaacagagattgtgcgtgttttgattttttaattcccttctaattcaacgattattcctgtaatttaacgaatgcctctgcgatttagcgattacctcagccgtttaacgattatgacggtacatgaagtctcaatccacataaaacgcacaaaccccgccgcagaattgcctgcagcggggttcacttatgttctgaaacaaccgaaaagcctaatttcaagcggttttcgggcatagaaaaagtccaccgtaattctattaaaattacggtggacttatggtggacccggagggattcgaacccttgacctctgcgttgcgaacgcagcgctctcccagctgagctacgggcccatattctgttcaacagcaaacattataacacagtctttcaaaaaaatccagtcctattttttatttttcacaattttctgtatgcaaaaagggccgaccgctttgggccgaccctttcctcatgaattattcgtttattttgccgctcatgatatcgaaacgcagtcgatcgtgccgcgggatggtccaatcggccatatagccgaaatcggagagggcacgcgaggaaaatcacacaccgccgccggcttctttgctgatggcatcgatgaaggcagggatgagctgctttttgcgggagacaacacctttaagccagatggtgcccgctttcggcgcacggccgaaggcatcttcaacgagcgtatcggcggactcgccgtaacacatgaggcgcgtggactcctcgatgatattcgtcagcatgaagaacatcatggagaggccatgctcgcggcaggacttttcgaggtacgggcgcaggcggcgctccagctcatcgagctcggagccgctcatgctgttgatctggccgacaccgaacgtgacgtcgccgaactcgaacttcttgtaatcctgatagaaaatttcttccggagtcttatccttgaggttgctgcctgcggtaaacatttcgataccgaagctctgacaatcgatgcccgcaatggcactgagcgcttccgctgcggcgcggtccagcagggtacaggtaggcgaacggaacatgagcgtatcggacaaaatggcgctgcacagaagacccgcgatctgcggcggaaccttaaagcccttttctttataaatggaatagatgatggtcgccgtgcagccgacgggctcgttgcggaaatacacaggtgccatcgtctcgagggagccgatgcggtggtgatcgatgatttccaaaatttctgcgttttcgatgttttcgaccgcctgactgcgctcattgtgatcgactaagatgacggagcgcttgcggatgccaagcaagttacggcgagagatcatgccgacgtacttgccgtttttatcgataaccgggaaatcgcgaatgcgggtgttctgcatggtatctttaatggcatcggtgtaatcgctcggggtgaacgtgacgagatctttcgtacgcatgaacgccttaaccggcatgcactggctgatgcggtgcgcaacggtgtacgtatcaagcggcgtagtgagcacggcgcagttattgtcgcgcgcgagcttctggatgctgcgggagacctctgcgccgaggcagacgaggatacagcccgcgccggactcaatggcggaaagctgcgattcgtaacggttgccggtgatgaccatgtcgtccttttcgatgtagttttccatgacgtccgggtttgcgacggcaatgacgacgttgccgtgctcgaaaacggcatcggggtcgccgacgagcattttggcttccagcgtttccaaaatgttgcagtacggcgttttggcttttgcaatcatggtgctgtcctgattttccatgtaggacgtggcaatgtcgttgatggtgatgatgccgtctaacacgttgtttgcatcgacgatgggcagcgtgacggcgttcatctctgccatcatgctccacgcttttttcatggaaatgccctcgttgatgccgggaattttgcggatctccatatcgcgcacgcgggtgccgatattgttgacgtaggtcggctggcgcatgccgaagcgctggaggacgtagcttgtctcggagctgatctgcccagcgcgggcggcgacatagtgatttccgtcattttctttatttttaacgtccgcgtaggcgatcgccgaacaaatggaatcggtgtcgggattgcggtggcctaaaacatagacttcttttctctcgctcatgcgtataccccactcaaggtaaaatgttgtttttagtatagcacagattttccgaaaaagaaagaaaaagcgaacggccgagggaaatttttgcacaccgttcgcaagattgtcgatttttgatttttgtcaaggcgccgtgttatttgcggtcgagcgtcagacggtttgcgttccacacggcaaaggcgagcagcgcggcaaacgccatgaggataacgggataaatctgcataccgagcaagtcgctgagcttgccgaagaacgcgggcatcgtcatgctgccgacataggcgcacgccatctgcatacccatgaccgcctgcgcgttttcggcgccgaaacgcacgggcgtttgatgcagaagcccagggtaaacgggcgcacagccgagcccgatgaaaacaaggcccgccaccgccgagaactcgaccggcacgaacaataaaaccgtgccaaacagcacgcagacgatgccgatcgataccatgcggcggtcgccaagcttatcggagataaagccgctgaggaaacgccccgccgtgatgccgatgtaaaacagcgaagccatggaggcggcgctttccgccgcaatattgtgccgcaggacgaggaagctgctggcccaaagccctgtggtgccctccaaagcgcaatataagaagaacgcgagcatggtgacgggtgcgccggtcattttcagcacacggcgcaggaaggatttcccgcctgtttcctccgcctcgcctgcgggcgttttctttcacagcgggcgcgagagaacaagcacgatcgtcagcgcgagctgaatgaagaacaccacgcggtagccggcgccgaaggaatagccgcccgtgaggcacgcacccatgatatacggcccggccatggcgccgagaccccagaagcaatgcagccaattcatgtggccggagcggtaatacagggcgatgtaattattcagagcggcatctacactgcccgcgccgagcccgtacggcaccgcccaaacacaaagctgccagaacgcgccggccgaagaaaagccgaatagtcccagcgccgtcaggccgacgctgatgaccgtgacgagatgcgtgccgagcctgcgcacggcgcggtcgctcatcaggctggagatgaccgtgccgcaggaaataatcatgctgacaatgcccgcataggacaccggaacattcatgacccggtacatcgtcggccacgccgagccgagcagggcatccggcagaccgagactgataaatgcggcgtagatgaccgcaagcaacaaagaaaacatatcgattccccttaattttttgtctttaaatcttcggataagaattgcaaaagcacatcggctttgctatactgaatactaatataacgtattttaacgatgtttcatagcaaaatcggtttaaaaaatacaaatatatcgtatatcttgacaaaatgcggaggacagcatgattccgaaattcagaatacacggcgacggcgcagagcttgtgccgtatacggtgccggagcttttcttttttgcgggcggacgcactttgtgcttcgacgcagcgcgcgagggcgacgccatcggccactggcacgacgaaatcgaattattatatgtaacggaaggcagcatggtgtacaatgtgaacggcacacgctgcacggtgcacgagggcgaggggatttttatcaacacgcggcagctgcatttttttgaagaaagccgttgcacctaccgatgcgtgctgctgcaccccatgatgctatgcgccaacacgtatttggaggagacgtacattacgcccgtgacaaaaaacgccgctttcccctgctgcatcttaaagccggaaaaagaaaaaagcggcggtgctttggcgctgatcgaggcgcttttcgacgaagcggacaaacacaatctgctgcgcctgcaaagcctttcctacgcggtgtgggacgagatctgccggctggcaccgaagcccgaaaacacggtttccgaaagcagccggctttcggccgtaaaaaacatgatgcacgccatacacagcggctatgcggaaaagctgacgctggaagagattgcgggcgcggggcatgtatgcaaaagcgcgtgcgaaaagctgtttcacacgtatctgcactgcacgccggtcgaatatcttcagcggtttcgcctgcaaaaggcggcggagcgcctgtgcaaaacggaaacgcccgtggcgcagatcgcgttggactgcggattctcgggcgcgagctattttaccgggtgcttcaaaaaaatctatggctgcacgccgaaagcgtaccgcagcagccgcaaaaacacgaaagcgtaaaaatgcaaaccgagccgtgctttttcagtcggactcggtttgcattttgtttcggatcacaggtctttctgcatgatgtagtcgttcatcacgaagccgctgccgatgtcggtgacgacggcgtccgtttgatgaaaaccgaagtatttgtagacttcgatggcgtgaaaattctttttgttgacggtgagatagattgcggggagtttttccgcctgacagagcgtttcgatgaaatcgaacgcggcgcgcggcaggccgcggctgcgatgagcggcggaaacgtagagcttgctcaggaacattttgccctctttgtgcggcacaaggccgatgaagcccgcgggcacgccgtcgtcgagcatcatataatagacgtagccctcgctttccatctggcggtggatggccgggacggactggaatttttcgatcatgtaatctgtggacgcaacgccgttgatgcagtcgtaggtctcgtgccagatgggtgcggcgatctcggctattttttcaatctgttcttcttccgtgactttgataaaggtaactgccatttttaactcagctttctttgtagtttccgaggaacgagaagcggggcatctcgtcggagagggcgcagatgagcgcaagtgtctgcacgtcgtgaacattcccggtgaaatcgaggtagaagtcatactcgaaattgcgctccgggatggggcgggattcgatttttgtgaggttcaggccgagcagagcgaaacgctccagcgtatggcacagcgagcccggggtgtgcggcagagagaagcacaggctgatcttttccgcgtcttcgggcaaaacggcttcacgcgaaatgacgatgaagcgcgtgcagttgttatcggtattctgaatatcggcggcgatgacttcaaggccgtattcctccgccgcctgcgcggagcagactgcgccgacgccctcgagacgggtttcggcgatgaattttgcggcagccgccgtgttggaataggcttcggtttcgatgtcgtgtgccgcgagatacgcactgcactgcacgagggcctcatgcttcgagagcacctttttgaccgcacccgtcccctttgcgcggcacaggcagtggcgcacgggaatatccgccgcaccgacgatgaacatgcggtgcttcatgatgaggtcatagacctcagagacactgccggcatcggaattttcgaccggcaccacgccgtaatcgcccgcgccgttatggacagcttcaaaaacatcgcggaagccgggtaaaaagatcggcttctgccccggaaacaggcgcagggcggcgctgtgggaaaacgcgcccgccgcgccctgacaaatgacacgcgggtcggcttttaatgtctttggggaattttgctcgaggtcgcgcaataccccgccgcttttcagcatattgtgctggcgggcgcgactgatgctcatgatggcgctgtaaagcgcgacggcgctgtcgccgtactcaccggcttcttttttaacgcggtctaaaatgacctgctcgcgggcggcatttaagacgggaatgcccgccttgcgcttgatctccgcgacgcgctccgcgcactgcatgcgttccgtaaaaagctttaaaagctctttatcaatgcggtctatatcgttgcgaaccggcaaaagcagttcatcaaaggacttattttcactcattttgctcgctcctttctattctctttaacgcagcaagtccatcagcgccaaggctgccgcagcttccgccacagggatggcgcgcgggacgatacacgggtcgtggcggccgtggatggttaaatcggcgtttgttttcgtggtgagatcgaccgtgtgctgttcacggccgatggacggcgtgggcttgacggcgatgcggaatagaatcggcatgcccgttgtgatgccgcccaaaatgccgcccgcgttgttcgttttcgtgcggacgagaccattttcgtcgtagtaaaacgcgtcgttattttcgctgccacgcatacaagcaacatcaaagcccgcgccgaactccacgcctttgacggcggggatgccgtataaaatcgatgcaaagacgttttcgatgccgccgaacataggactgccgatgcctgccgggacaccgactgcggcgcactcgatgatgccgccgatgctgtctgcgtccaatcgcgcggcttcgatctcggcgcgcattttttcttcggccttgggggaattgaccgcaaaaaagcgggtatttaaggcatttaagtcgtcttttgagacgtttacgggatcgaacggggtatcttttgcgctgccgaccgcataagcgtgcgcaccgatcgtgatgccgcggcgctctaatatctggcggcagacggcgcctgcgaacacgaggcacgcggtgagacgacccgaaaaatgcccgccgccgcgaatgtcatttgcgccgtcgtagcggacagacgcggtgtaatcggcatggccgggacgcgggtgaatttttaaatcggaataatccttcgaacgcgtattggtgttcgcgatgatagccgcgagcggcgcgcctgttgtgacgccgttgaagaggcccgagagcacctgcggctcatcggcctcaaggcgcgtggtggcggtcttgtccttgcccggcgcacggcgtgccatttgcacgcgaattttttccatgtctattttttcgttcggcgggagattatcgagcaccacgccgattgcttccgtatggctgccgccgaaaatggacagcttgatgttttcaccccaggtcgatgccatcggcgatccctcctaaatgtttatgatcccggaaaaatccggggtaggattttttgatgctttccgcgtccgtgacggtgactgtgcacgcacaaccggcggcagcgagcgccatgacgacgcggtggtcgttcatgccctcagctttgccgcccgtaagcgcgggcttgccgtgaatgataaggccgtccggcacggctttaatgtctgcaccgaggtttttgagcgccgcttccatggcaagcagacggtcacactcctttaagtgcaatcgctccgcatgggaaatgacggtctcgccctccgcgaacgcagccgtgacggcgagcgcaggcaccatatcgggaatttgcgcggcgttaatcgcgatgccgtgcaggccgcggtagggcttatctgtatttttgttttcggcaacataaacgccgttttcttcggtgacagaaagcccgaactgccgccagagatggacgcaggctttatcgccttgcagagaggtttcggaaaggccgagcaggcggatagggccgcctgagacagcggcttccgagagaaaaaacgcggcctgcgaccaatcaccctcgacggtatagtgctctgcgcggtacgtctgcccgccgcagatgtgccagccggtctcggtctcctcaattttaacaccgaagcccgcgagcacctctatcgtcaaatcgatatagcctttggattcgagcggggtggtcagcgtaacggtggaatcctttttgagcagtggcaaagcgaataataaaccggttataaactgcgagctgatgttgcccggcacgcggaaatcgccgctttgaagcttgcccgtgatgtgaaacggcagaccgccggcagtctcgaccgttacgccgtgctgcggcagaaggtctgtgtaaacgccgatagggcgctcgggaagtctgccgtgaccgacaaacgtcgcttcgatgccgagggcggcgaaaacggggatgagaaagcgcagcgtggaaccggattcaccgcaatcgaccgtgacgctttggggtgccgtgcccggcgcgatgcacagcacgccgttttcttccgctttcaccgtgccgcccatggcgcacacgccgtttaatgtagcttccatatccgcgctgtggtcaatgggcccgacacggcacggcgttttgcacagcgccgccgaaagcaatgcgcggtgcgcggcacttttgcttgggggaatgcgcacttcgcccttaacgtgggcggggcggtaggtcacctctgccatagtatcaccttgtttctgcataaatttatctctctatatttgacataaggcagcacgatgagaatgatgctgccttcctaaaaatcaattcaattttctgcggcggttctgctcggcggcgagtttatagcgcagcacgaggtagtttctgtccaccgggtgaataacgctttcgccgatctgctttaagaggatcaggttgagcgttttgccaaagctttttttatcgagcgcggttgcttccacaactttggcgaaatcaaatgcggactcggtgggcatgccatagctttccagcacgcggcggatacgcgcagcggtgcctttttccgtgacgccgagactttcacccacttcgcccgccatgaccataccgatgccgacggcaaggccgtgcgaaagcgacgagaagcccgtaagcttttcgagcgcgtggccgaatgtgtggccgaagtttaaaatcatacgccggcctttgtcgttcgtgtcttcctcgacaaagtgctttttgcacagcacgcagcggcagatggtttcctccaaatggtcgatgacttgtccctgctccaatttatcgaacagcgcggcgtctgcgatgcagccgtatttgatgacctcgcccatgccgtccgtgaaataggcatcgggcagcgtggagagcgttttgggatcggcgaggacgaggcgcggctgatggaacgcgccgacgaggtttttaccgaacggcaaatcgacacccgttttgccgccgacactggcatctacctgcgccaaaagggacgtgggcacctgcacgaaatcaatgccgcgcaggaacgttgccgccgcgaagccacccatatcgcccgctacgccgccgccgagcgtgacaatgatgtcgctgcgcgtgaaatcgttttccgcaagcgcttcgtaaatctgcatgacggtggaaagctgcttttgcggctcgccggcttcaaagacgaactccgccgtgtggatacccgctttttcaagcgaagcttttagacgctcgccgtatatcgggaagacgttcgtctcactgacaatcatggcgcggctgccggggcggacgagcggggcgattttttcgcccgcgcagtccaaaatgccgtcttccacaataacttcatacggtttatctgttttaatttcgatcaccattatccgaatttctcctttttttcacgtgcggaggaaagcagcgccacgagctctgcccgatcgtttttcgccaccgcatcgcgtatacgttctatattgcgcacgagttcttccgtctcgtccgctaattcctcacggtttgcaaggaaaaggtctgcccacagctccgcattgatgcgcgccacgcgcgaaacgtcgcggtagctgccggcggaaaagccgctgtgctcatcgcagcgcgggctcatgacataagcgcacgccaaaacgtgcggaatctgggacgtataggcgatcatacgatcgtgcttttgctgcgtgcagtatttgatggtgccaaagcccatgctttttgcgagcgacacgagggtgtctgtggcgctttgcggagcttcgccgggcacgagaatataggaagcgttataaaagaggcttgcctcactggcatcgaacccgctgcgctccttgcccgccatggggtggccgccgacgtaaacgaacggatagtttttggcgatctccgttaatttgccgcagacctgatttttgatgccgcacacatccgtgacaatgcagccttctttaaaatgcggtgcgttttcctcgacgaagcgcacgacatctgcgggatacagacagacgtacacgacgtccgcgttttcgagcaaagacgtgctgccgacggaatcgatggcgcctagggaaagtgcatcgagcagggtattttcgtcacgatcaaagccgatgacggtgtgctctgtattttctttgagggcctttgcgagcgaaccgccgatgagacccagaccaatgattgcgatttgcatatcgttctccctttcgggtaaatttttacaggctcttcaccgtttcggtgaccttctgcactttctttgcgagcacgtcgaactgatccggcgtgagggactgtgcgccgtcgcacagggcgcggctggggtcattatgcacctcgatgatgaggccgtctgcgccgacggctgccgccgccatggcaagcggctcgacaagccagttgatgccgctggcgtggctggggtctacgatgacgggcaggtgggaaaggcgctttaagatcggcacggcggaaatatcgagcgtattgcgggtgaatgtctcatacgtgcggatgccgcgctcgcacaggatgacttgctcgttgccgcccgccatgatatactcggcactcatgagaagttcttcgatggtgttggcaaggccgcgctttaaaagaatcggcttatgcacgtgacccagctcctttaaaagctcgaagttctgcatgtttcttgcgccgacctgaatgacatcgacatcttcgaacaggtcgaggtggccgatgctcataatctcggtgacgatgggcaggccggttctttccttggcttttttgagaagctcgaggccctctgccttaagaccctggaacgcatacggcgaggtgcggggcttgaatgcgccgccgcgcaggaacgtagcgcctgcggccttgacgcgctctgcgacacagcagatctgcgcttcgctttcgacggagcacggacccgcgatgagcgcaagggaaccgtcgccgatcacctgaccggtaggaagcttgatgaccgtatcttccggatggaacttacggtttgcctttttatacggctcctgaacgcgcttaacgctttctacaatatcctgtgcggcgatgtactcgctgtctaccgcagcggtatcgccgataaggccgagcacggtggaatgtgtgccgacccatgtgttaacactgacgtcataacggtcggtgagattcgaaatgaaatttttgacctgttcttcactgcggttggctttgagtacgatgatcatgttttttcccttacctttcttttataggagccgtgccccgctgccgctctcggcacaaaaaaagcgaagcccattggctccgcttggttttatactgctcagaatacttcaaattcctccgcgcagaaattttccgcgcgttttcaagcgttgcccggtatattcacatacgacgaaaagcacacggtataaaatcgtgcgctaaaatactttgtaaatcgtcttgtgaataaaacggactgcatagtttgaaccatcctatatgtgactcttgctttgcgatttgcaggtttactttatccatcctgcatcgccgtgttaaaatcataccgccgcgcgggcgctttgtcaagagttttcttgcggtgttccgggagaagttccttttttgcgtcttcttctgcggaagcgcttcttttgagactgctccttttcggaggtatttcccggctttttgcgcttcgctttttcaatgggctcgccgcgcagggcgcaaatgcgctctacaacgacaaccgtgggcgcgccggcgtcgacgatgacgtccgcgcttgcgaggtatttcgggcggcgctcgtttaaaaggcgctcaatcaccgcgcggcggtccggcgtctgcagaagcgggcggcgtttatcgtttttgaggcgctcctgcaaggcggccagcggtacgtcgagataatagatggtaccgccgccttgatggaagccctctacgttctgcggctgcatcagcgtgccgccgcctgtggcgatgacgaaatgattactttgcgcaagctcctttacggtctcggtctcgagcgcgcgaaaatgcagttcgccgtattctgcgaaaatctccttgaccgtcatgccggtcttcttttctatgtacaagtccatatcgacaaactgcatatcgagcgcggcggccaagcgacggccgaccgtggtcttaccgctgcccatgaagccgcttaaaacaatattgcccgattttatgatttcaccttttacttttttgtccatttcccgttccccgtttctttcggttcgttatgcgcggaaaagccgtgccgtttccgcttccgcatcgcagatgagctgttcgatatcgctgtccttaaacgatgcgccgtaccagagctcgtgcgcggcgaccgcctgacagacgagcatgcccatgccgccgacagttttgagtccgcagtttgcggcaagcgttaaaaatttcgttttgccggggttatagacggcgtcgaacgcggctttgcagcgggagagcacgtcttccccgacggcactgacaccggttttggggtacataccgaggcttgtggtgttgagcacgagatcgtagtgctcggtttcctttgcgagctcgtcataagacagcacgcggaacacgccggttttgctgcgcgtgcggcagagctccgcgagttcatcgctgagcacctgtgctttttcgagcgagctttcgcggcagacgatatcaagatgcggtgcatcggccgtgagcacggcttcaaatgcgatggcacgcgccgcaccgccgcggccgagcagaagaagctcgccattaaaatcgagcccatagcgcgcaagggcctttttgcagccgacaccgtccgttgtgtagccggtcattttgccgtcttcgacacgcacggtgttgacggatccgaaaagcttcgctttttcgtcgataccgtcgagcaggggaatgatgtcgcttttgtgggggatggtgatattgaagccgtcgagcgtgcgcaatgcgggcagcgcctgtgtaagggacggtacatccagcacggaatattccggcttatagcctgtgagggagaagaggcggtcatggataaacggcgacatcgtgtgcccgatggggtgcccgatgacggcaaaacggcgaagctgcattttaaggctctcctttaaaaacagaaaaatttagcacggaatgcggaattgctattgacaaataagccgtgcatccatacaatgtatgtgaagtacaccccgattgtatcatgcctgcggcgttttgtccatacggcagacggtgcagtacttgacaaatactacacgataggaggaaaattaaatggttctggagaaagttatcgatattattgctgaggagctcagcgtagatccctccgagatcaccgaggattccaacctggttgaggatctggacgcagattcccttgctgttgttgatcttgtcatgtccatcgaagatgctttcaacgtagaaattccggatacggaagttgaaaacctcaagacggttggcgaaatcgttcagttcatcgaagaacatcagggtcagtaaattttacgccttgtgcaaaacgatatgaaaacaccgggagcggctttctggctgttcccggtgttttttttcgctgatttaatttgttccgatggacagctgttttgttggtactctgtttctgcaaattagtttaaactaacttttaattatttatgtataagtatctttggtacaaattgcaccgaatagtacaaggaaagaagaaacgaaccttcttttctgtttttttaaataaaatcttaggcggcccgcacaaagatggctaccgctcttgcttttcagaaaaattccctgtataataagaaaagatatgcccgctttgggcccggcggcacagcgtttgccgcacgaatcgtgaaaggactgaatttcttggcgaatcagaagaagatggtcaacgacatcacttccatggacgttgacttttccaaatggtacaccgatattgttaaaaaagccgagctgatggattactccagcgtaaaaggctgcatgatcatcgagccgtacggctacgcgatctgggaaaacattcagcatgaactggacgatcgctttaaggcgacgggtcaccagaacgtttacatgccgctgttcatcccggaatccctcctgcagaaggaaaaagaccatgtaaagggctttgcgcctgaagtggcttgggtaacggaaggcggcaacgagaagctgagtgagcgcctgtgcgtacgcccgacgagtgagattctcttctgcgagcattaccagaagatcatcaactcttaccgcgacctgccgaagctctacaaccagtggtgctccgttgtgcgctgggagaaaacgacgcgtccgttcctgcgctcctccgagttcctgtggcaggaaggccacaccatgcacgaaaccgcagaagaggccatggaagagaccatgcgcatgctgcacacctacgaggagttctacaagaacgtgctcgccattccggctgtgaccggccagaagaccgagaaagaaaagtttgcgggcgctgtggcgacctacaccattgagccgatgatgcacaacggcgttgctttgcagggcggcacgagccactacttcggcgacggctgggcaaagaacttcggcattacgttcacgggacgcgacaataccctgcagcacccgcaccagacctcctggggcgtttccacccgcatgatcggcgccatcatcatggtacacggcgacgacaacggtcttgtactgccgccgaaggtcgcgccgatccagctggcaatcatcccgattgcacagcataagcccggcgtgctcgacaaggcaaacgcgctgtatgaatccctgaagacgaagttccgcgtgaagctggacgacaccgacaactcccccggctggaagttcagccagtatgagatgcagggtgtgccgctgcgtttggagatcggtccgaaggatattgagcagaaccagtgcgtgctcgtccgccgcgacacgagagagaagattttcgtttcgctcgataaccttgagggcgagattgaaaaggcactgcaggctgtgcatgacggtctttacgagcgtgcgctgaagaaccttgaagagaagaccttcacggcgacgacgtatgaggagttcctcgacattgcggaaaacaagcccggcttcatcaaggccatgtggtgcggcgacagcgcgtgcgaggacaagctgaaggacgcgaccggtggcgtgaagtcccgttgcattccgtttaaggaagagcacctctctgatgtttgcgtttgctgcggcaagccggcaaagcacatggtctactggggcagacagtactgatttttctgctttgcgtagcgctatatcaaatcggcatacgtgttttacacggttttaactgtgtttttataagcagaatgttgtaagaatactttagggcacaccgtattttttgcggtgtgcctctttttttgctcttttttatgaaatgcacggctgatttttggacgcgcaggcaacaaagcaaaagtttttatgcaaatgatacaagcaaaatagaaaaagcttgtgcaaatccgcttttttcacaaaaagggctttacatttgctttggaatggtctaaaatacaagcagaaataaatcgttaggagtccgtatggacttcggcgtaaatttaggaggagaattccaatggcaaatgtaagagttggctttatcggctgcggcggtattgcaaacggcaagcacttcccgggcatggcccagcaggaaggcgtagatatgtgcgcattctgcgacctcattcttgagagagcagaaaaggccgctaaagagtacggcaccccggacgctaaggtttacaccgattatcatgagcttctggcagacccgacgatcgacgctgttcacgttctgaccccgaacgttgcacactgcgagatcaccgttgctgctcttgaggctggcaagcacgttctgtgcgagaagccgatggctgctaccccggctgacgctaagaagatgcttgaagcaagagacagaaccggcaagatgctgacgatcggctatcagtatcgtcacttcccggagaaccaggttgctaagaaggttgtcgattccggcgctcttggcgatgtttactatgcagaggctacatacctccgccgccgtggcgttccgacctggggcgtgttcacggataaggcaaagcagggcggcggtccgctgatcgacatcggtacgcatgctcttgacctcacgctgttcctcatgaacaactacgatgttgactatgtttgcggcacttccttcgagaagctcggccacacgctcgatgctaagcatcagggtcaggtcaactaccgcggtgagttcgatacctggaacaacgagacctacgacgttgaagactccgctgttggcttcatcaagatgaagaacggcgctacgattgttctgcgcgctgcttgggctatcaacatggctgaagactacgctgcaaacggcgaagcttacacgatgctggctggtaccgagggcggcctcgatacgaaggaaggccgtgtccgtctgaaccatgttgttgctgagtacccgaccatttcttgggttggcaacaaggtcagaggtttcatcccgggcttctctcagggtccggcaccgaagtccaaggaagctgagatctgggtcaaggctctgaagggcgaaggcgagctgtttgttacggctgatcaggcttatgtcgtcacgagaatcctcgatgcgatctatgagtccaacagaaccggcaagcctgtttacttcgactaattttaatcagtacattttgtgtgcggcggcatttcgtgtcgccgcacattttttaaggcggagtttccgcaaacgttataattttcagaaaggtgttttttcccatggaaaatatcaatgtccaggtttattccctggtttccgagccgattagcccgattgagaagctgaagaccattgcaaagcttggttttgcaggcgcagagttcactgcggacttcacggaagtgccggttgaagaaatgaagaaggttctcgcagagaacaatttgaaggtcgattccgctcacgtcggtctggatcagattgaaggcgttctcccctactttgcagagctgggcgcaaagcttgtcatctgcccgatgacaaatttctgcaacaaggcagaagctgaagaagttgcagcagaactcaaccgcctcggcaacattgcgaagcagtacggcatcaagatcggctaccacaaccacaccgacgagttctatgtggacgagggcaagtatctttatgactggctcatcgatgcatgtgacccggaagttacggctttccagcttgactgcggctggtgcagcgcagcaggcgtaaacccggtagacttcatcaacagccacgcaggccgcattgcaagcatccacattaaggaaaacggcggcgttatcggcgcaaacaagccgcagtcccgccacgacaccaccccgcgcttcaagtttgagaaagacgctgacggcaagccgatcttcccgccggagttcctcaagatgaaggaagagcacgacaagctgaacgtgccgcagggccagggcattgtggactggaaggctgttaaggcagctgccgacgcacagtgcgacaacgtcatttacgttgttgagcgtgaagccagctacaacgacccgcaggatcgcgtagcttgccttgctgaagacattgcatggctgaaggctaacctgtaatttaatttaatgcaaaatgagccgagcacagaagttgtgttcggcttttttgttgcgcaaaaaaagaagcttgcggggaacatagcgtagcgacactaaaaatttcgcccgccttttcaaaggcagaggggacttggggcagtgccccaagtcccctcaagttttctcgaagaaagtttaaatcaaagcttttattcgttcgctttcacaggcaaatgcgaagcgcttagtgctggatctgctgctcttcctcgtcatcgttatggctccacggcgagggggccaattttttatgcagcgcaacaagctcgtggtcgtagttatgtctgacctcacactttttgtcgaaaatcatggtcgcttcgtcgtctgcggtgcaagccggccactccggcaggtcttcgctggacggtttgccgtcacgcgcgaagttgagccacgcgtcgcacatctgcttttcgagcaagtcggtcacgccgggctcgttatacgcggcgacgaggctcgtgttatggaacacaaacgggatctcgctgcaatgccatgcgatatgcccaccgtcatacgggaaggtgtaggtcatcatatacgaatacgtgccgctttccgggtgctgtgcttttttcaagatgaaatcggtagacggcgcgcggaaaatagaatccatgaacagcacgtcgctgatgtccttatccgggtaaacctcggcgaacatctccttgagctttttgccctctgcgccgtagcgtttttcgatcatagaatcgatgagtgcagcatcggacttttcctcttcgcttaatgccggcatgaacgagaactcgccgagcacggtgccaaccatgaccgggatggtctttgcgtgctccgtgaaaccgacctcgagcggatcgccgaggtaccaatcgtttgcgagcgggttgccgccgacgtatgcgcctgtctttgcgacctccggcgcgaccttgttgtacgccgccgcgagctgtgcgtacgggatggtctccagtgctttgacatcatcgagcttcaattctgccagaagcgccgtgacgatggctttgccgttctgctccgtggaattgccggagacgaagtgatcgatgcagccgctctgcacgacgcccttatggaacaggccgtccgccgcaggggtctgcatcagcgtccagaccttcataccgccgccggactggccgaacagcgtgacgttttccgggtcgccgccgaagtttgcgatattttcgtgaatccactgcaaagctgcgaccatatcggcgttgccggcgttgccggaattcttatattcctcgccgaacggggaaaggtcgagatagccgaggatattgaggcggtggttgagtgaaatgacgacgacatcgccgtatttgctcatgttttcgccctcgtaggcgatgtgctcaatggaggagcccgccgcgaatccgccgccgtgcagccaaacgagcacgggctttttggcgttcgggtcaagatgctgcgtccagatattgaggtactggcagttctcatcgagcggccaatagcggtgcggcaccatcagctcgttgctgggctgatcctgctgcagcatggggcacacgtagccgtaagccagcgcgtttttgatgccctcccacggctctaccggggtcggctggtggaaacgctttgcatcggcgtattttacgccgtggaacacatatgtgccgtcaagctgaaaaccacgcagcttaccggctttggtctcgacgaccgggtctgttttggtgcacatgaaatttcttgccatatatcacaactccttaaaaatttgacaagtaaaaaataaccttgcaatgttaattgtaaggttatttcttataaatgtcaatattctaatttttgattttatgtgcaatttacaagaacaggtcttttaaaagctgcttgccggtctttgtgcggaagatgttctcgtacaccttttcggcggcttcatgggtcatgccgctctcgaaaatgtttacgaggaaatcggcttcaacgagaatttgataatcgatgccgttgatgttcgtgtacgtgtggtggtggccgatgaggtagcagatgcgctctgtctgctcatgggtatagccgcacgcgggcagcatttcgagtgcgatgggcgggccttccacctcctggtgagggccgttgcagttgccgtatttttcaaagcacacacggatgccgatgtcgtgcgtaatggcagcggcttccaaaatttcttttgtcgcatcgtccacgtcttcgccctccgcgatggtctttgcgaacgcgaacaccttcaaaaagtggttgacgcgctcgacacagccgccctcgtactctgtcattttcaaaacgagcttgctaaaatttgtcatgtttttcacttctttctttcaaaatcgtctgcgcagggcacccagtaccggcgcgtgaggatgccttcttccagcactttgttttcgagtacgccgccggcgctttcaatcgttttcgccgatccggtgtttgtatcattgcaggtgatgagtacctttttgatgccgattgaacgcgcaatgggcagcgcgagcgcaagctggattttggcatacccgtggcggcgctcactcggcacaatgccgtagccgatgtgaccgccgaacagcctgaggtagtcgttcagctcgtggcggatgtccacggcgccgaagagttttgtttcgttgtcatcggtgagaaaataaagcgtttcattcacaaagccctcggggacacgagtgcgcttttggatgctttcacgccgccattcctcaaacggcagatttttcggatttgcggacgcgatgggtacgatgcgctccgcgccccagtctttaagatatgccgcatactgcgtcgctgtaatttgttccggcaaaatcagtttcattgaaatttctcctgctattttgccatgacggcctcgatgtcttcgatggtgcgcggcacggacgcagagaggttctctgcgccggtcggcgtgacaaggcagttatcctccacacggaagccgatgccgagatcttcggcgtaaatgccgatatcaacgcagaagaccatgttcggcgcgataggcttgccgagtgcatcgacaacatcgtgcacgtcgtagccgacatggtgcgcaccgccgtgccacatgtatttgccaatctcatcgtaagaggacagcagaccgatctttttcagctgctcacagcaatagcggcgggcggtcttatccacatcgtccatgagcataccgggcttgatgatggagaacatgtagttcgacgtattgagggcacactcatacagcatgcgctgctctttcgagtatttgccgttgcacggccagccgcgggagacatcgttgcactcgccgtcccactgcgcgccaacgtcattcaagatcatatcgccgtctttggcttgtcccatgtagctgtcgtaatggatgcagaagttgttttcgccggcggaaatgatggagtggaacgcgggctcaagcacgccggcgccggtgagggcatagtcgaactcggctttatactcgtactcatacatgccggggtgcgaagcgcgcatcatgcgcagaatgccttcgcgcgtaacggtcatggcgcggcgcatggcgtcaatctcgcacggagccttcagggtacgcaggcgctttaagatgggcaggatattttcaaccgtgaggaacgggtagccggtcttaatggtctgcgcgaagcggtgggcttcatctaagccctcgtccggcgtatggcggtagagatcgaggtagacgcgctgcacgttgccgctgttcaaaacacggtggatatcgttttcaaagttctcaacgaagcggatatccgtgataccggactgcgctataacttcatcggctttcggtctgcggcctgtccagcgctctttcatgagatccggcgggaggatatagatggattcctgcacattgccgccgatttttgtggcgaccaacacgagccccgcgaatttaatgcccgttaaatacaggaaattgcggttcgtgaagaatgtatagtacgcatcggcgctctgacgcggtgcgctgccggaaaagaacacgactgcgctgccgtctttcatttcggcgtacaggcgctgacggtttgccttgtggaattctgctgtcatgataatccctccgaatcttctttgcttttatctatttctaaaggcttgctgagcaagccttttaagaaaccccttgatagggtttcttacatcaaatcgtccaccggacgatttgactatcttcctgatctttaggtaggcaaaagagtttcgagctctgcggagctcgacttggggcgttgccccaagtccccaccaactttttgaaaaaagttggatcaaaaactttattcgccgctccgctgtggaaaacgttagcttacttcagctttgcagccaaggcgacccagcctctttcctctttgcggtcgatgatctcgaatttatccgcgaggcacgccaaaacgtcgtcttcccttgtatcgatgataccgctcatgatatagacggtatcgggtttcatgaagcgcggagcgtcttttgtgagcaaaatcacgacgtctgcgacgatattcgcgacaacgacatcgaatgtgccggtaaccttatccgccagattgccgcagatgccggtgaacttatcgccgacgtggttgatctctgcgtttgcgacggcggtcttgacggcgagagcatcaatatcgacgccaacggcgctgcctgcgccgagcagcagaccggcgacggacaaaataccgctgccgcagcccatatcaagcatggtatcgcccggctttacatacttttcgagcagttccatgcaaaggcgggtcgtttcatgcgtgccggtaccgaacgcgaggcccggctccagatgcagcacgacgcggtcacctgcttcgtactcgtcctcccacatgggacgcacaagcaagcggttgccgacggggatgggcttaaaatactttttccagttgttgatccaatcctcctccgcgcagttggcggcggtgatggtgttctcaatgccgacggcttcaaaacgctctttgaggaaagaaatggcttccgccgggttttcctccgggctgatatacacatggatgatgcttttggtgcggtcttttttgagaaggtcttcgtcgatgaggtcgatatgcgcgatctccatcgcttcctcttctaaatgcgaatagtcttcaatataaatgccgtagggcacgaccatctgcgcaatgtcgcccgcgcggtccgtatccgccgcgggaatggtgacctgtaattcggtccagtctgcgtttacctgatctgtcatactttttaactcctgttctctttttataaaatgcagaaaattatctatacatttctcatataagctgattatacaacgcgtccggaaaacttgcaataggaggccctgcgacaatcatgacaaaacgcaaatttctgctgcaaggcatcgctttaacggcattttcactgtttttccgcattacgaatatcggctaccgtgcgtatttatcgggcaaaatcggcgcggagggcatggggctttaccagctcatcttctccgtgttcctgctcgccatcacgctttccacttccggcatcagcttggccgtgacgcgcatggtgacggcagccattgcggcgaaccaccgctgcacggtgcgcagcgtggtgacgcagtgctttttgttctgcctgacggtgagctgtaccattgcggttttgctgctgtgcttttcggattttgccgccgcgcatattttgggcaacgccggcgcggcgccgtctctgcgcattttggcgctggggctgccgtttatgtcgcagtgcacgtgcatgaagggatattttttagcagtggacgaatcgctttccacctcatggagtgatgcggtggaacaggtgctgacgattttctccgccgttatgctgttctggtattttgcgccgcagagcatagaagccgcgtgctttgcggcgatgattgcttcaacattcggagaagccgtttcgtttttggcggggttcctcatttaccgccgcagcttaaagcgcaacacgccgaaagaaaaagagcaggcgacgggcgttctgcacgggatgtttcacattgcggtgccgtgcacgctttcgagcgcggcgcgcagcttgctttcaacggcggaaaatctgctcatcccgcgcgagctcgggcgttacgggctcagtcgtgcggcttccatgtccgcctacggtttattgcagggcatggcaatgccgatgctgtactttccgtcttcgtttttgacgtcgttcgcgtctttgctcatcccgaaaacggcacgggaatttgagctttcgcaccgcagggccgtgcggcacatcacgcagcgcgcggtgcacgcagccctgcagttcggcattttctgcgcggggatcttcttcgttttcggcagtgactggggcgaggcgttttataagagccgggaagccggggcatacctcaaaattttggcgccgctcgtaccgcttttatatctggatgtcgtggtggacagtcttttaaaggggcttgacgagcagctgaactccatgaaatacaacttttcggattcgtttctgcgtgtgcttttgattttgctttttatgcggtttgccggtatgcaggcgtacattgcaattttgtttttctcgtccatcttcaacgcgatgctgagtgtacgaagattattaaaagtcgccgatgtgcatatcgggctattgaaaagtgcagtgatgccggcgttttttgcactgcttgccgcgaatgcaacacagtttttattgaaaagcattttgctttcgggtattccccttgttttgctgcaaacggcggtttgtgcagggttttatgccgctttgctgttcccgtttttaaagctgtgcgcgtatcatacggacaaaaagcaaaccgttaaaacataaaagcggcgctccgacaggttgccctgccgaagcgccgtggttttatttacgtgttgtcagaaaggaatcagatccaacgggtctcggtcatcttcggctcgaagatgatagcggacttcagggtctcaacagccttcataaggccctcgttctggctcatgaggctatcctcatgttcaatgctgatggcatagtcatagccgacaaggcgcagagcgctgatgatgtccttccaatagagcagatcgttgccgtagccgacgctgcggaagatccaggagcggtgtgcttcgtctgcatagctcttcgtgtcgagcgcgccgttctttgccatgttgtacttatcgagacgggtatcctttgcgtgtacgtggaagattgcgtcgccgccgagctcgcggataacagcaaccggatccatgccctgccaaatgaggtgggacgggtcaaagtttgcgccgatctccgggcccacagcctcacggagcttgaggagcgtctcggtgttgtaaacacagaagccctggtgcatttcaagagcgatcttgttgacgccgtgctctcttgcgaatgctacaaaatccttccagtaatcgacaagaatcttccactgatactcaagaatcttaccgaaatcgtccggccatgcgcatacaacccagttcggatactgagaggtctcgcaatcgcccgggcagccggagaagcagttgatctgatgcaggccgtatttttcagccatcagaactgcgttgcgcatgtccttatcataagccgcagccagctccttattcgggtggatcgggttgccgtggcaggagaatgcgctgacttccatatcatacttcttgatggtatcgcagaactcctgatactttgcttcatcgtggagcaaaacttccggatcgcagtgatctttgcccggatagccgccgcagccgatttcgaccatctggatgcccatggacttgaaatacttcagtgcgtcctcaagaggcatgttgcctacaacattggtaagtacgcctaacttcatgttaaaacactccttctaattgaataaatcaaaagaataacagattgaattggggctttttctgaaagagaaaaccctgtttgattctattgtactatatttccttggtaaaatcaacatggatttggcttttacgccgcattttttttggaatgtctttcggcagatgtatgaaatttttgtggttttccgtcaaattcacggtagaatttcgccgggccttccgctataatgaaagttagcattttattaaaggcggtataattaaatggagaagacccaaaactttaaaagcaccgtgtttgcctgctaccgcgggtatatcacgcagggcattgtgaacaatctctctcccctgtttttcgtgctgttccaaaacaaattcggcatttcgtattcgctgatttcggcacttattctgtgcaactttgtgacgcaggtcatcacggatgtgctttccgttaaatacgtagaccgcatcggctaccgaaaatcggcggtcatcgcacacgcgctggcgtttttaggtcttgtgatgcagggcacgctgccgaatgtgctgcctgcgccgtatgtgggtcttgtccttgcgacgattgtgaacggcgtgggcggcggcctgattgaagttatcatcagcccgattgtcgattcctgcccgggagacgcgaaggcctccgcgatgagccttttacattcgttttactgctggggacaggtaggtgtggtgctcatcacgacgcttttgctgcgcttgatcggcgaggatctgtggtttatcatcccgattttgtggtctttgctgccgctttataatttattccgtttcctcaaggtgccgctgatgcccaccgtgccggaggaagagaaaacaccgctcaaaacgctgtttacctcgaaaattttcctcgtggcactgcttttgatgctttgcgcgggcgcgagcgagcttgccatgagccagtggagctcgctgtttgcggagcgtgcgctcggcgtgacgaaggtcatcggcgaccttttagggccgtgcctgtttgcggtgtttatgggcatcggcagaacaatctatggcgtgtggggcgagaaaatccatttaacgggcgcgatggtattctgcgccgcactgtgtattttgtgctatctcggtacggctttatttgaaaacccgtggctttctctgctttcatgcgcgctgtgcggcttttccgtgagcctcatgtggccgggcacgttttcgctgacttccgctgcatacccgaagggcggcacggcgatgttcggcattttggcggtgttgggcgatgtgggctgctctgtgggcccggcattgatgggcgcagtgagcggcgcggtttccggcaatgcaaaaatcgccgcatctttcccgaatctcactgcggaccaactcggtttaaagagcggtatgctgttttcctcggtttttccggcatttattttaatcggcgttctgttgctcacacggtttcataaggctgcgaataaaaagccaagccccaaagcggacttgagcgaagaatagttttcaggcaacagatagagaaaaagtgcaatgcaaatctcttgcatttgaatttgcaagggataaattgttgcacttttgccagattgctaccaaacagaatttgtgaatgcaaacctcaaagcagtttgcttcctgcaggctttctatcctgcggcctgtgtcagcacacatgccgttgtgctttgcgacatgaacggcagacaaatgccgctctcacctgcgccgattagcagctccgtgccgttttcgcaggaggcttatacgtcagatactcaccgtaacagttgggtttccagctcgcgaacgcggcgaagaatatcgacggaataggacggaatacggccgagcgcatcgggaccgacgttcaaaaggtagtttacacccatgccgttgagcttctgcttgtttgcaaggatctgctcgggtgttttccagttgtggtcgtagtatttgaagccccatgtgtcgttcagcgtggccgcggtctcatagaggttatacggcgaatacttgaagccgaacagatcgttcatggactgcatgtcccctgcgcgttctttcgagatctctgccggacgctctgcgggaatctcgttatcgccgagagaaacgtaatcatacacgccgttgccgaggcgagagttcacaaggcagtccggctgatactgcttcacaaggtcgtaaagctcctgactctgcgcctttgtcatcacgcccggggtatcgaaccagatcaggcagatgtcgccgtattttgtcatgatctccttcacctgcggcttgatcttctcgttaaagcagatggagtagtctttgttgtctgcaccggggaaatcccagttgttataccacgccgtgcctgcgcagccggtggttttgtcgtagccgccgccgtgcgggtggtgccagtcaagctcctgcgaatagtaaagccccagctttaaaccgtgcttgtagcaggcttccgccagctctgcgatgaggtctcttccaaatggcgttgcttttttgatgttgtatgcatcgcagtcggaatcaaacagcgcaaagccctcgtggtgcttagaggtaaccacaaagtaggtcatgccgcattcttttgcaagctttacccactcctccgcattaaaataaacagggttgaacgcacccgcaagctgttccatttcgcggttcgggatggcaaaggcggactggatccattcaccgtaatcataaggcgtgcggcgccctctgtactcaccggcgagcatggaatagagtccgaagtggaccatcatgccgtatttcgcttcgcgaaaccattcgatattgttcatgtcttttctgcacggctgccgacgaaaaaaattgcgcagccgtgcttcctcctttgagaattttttatgtaccctattatagcatacggaaccgaatctgtcttgctgtttcttttttatacaagcgaaaaaagccatgcagcgtgctatactgaaaatgaagacaaatcaaagcggaaaaaccggagacatagtatggcggaatatgtagatattgtagatgagaacgggatccccacaagcgaaacggtagagcacgaaacggcgcacgcaaagggctttcggcaccgcacccgcgcttgacgcaaaagcacttgcgagcctgcttgccagcaatcccgaactactcaaaaaggctttggagtctgtcctgcttgcaataacacctgagtttattagcgaagcgcaaattagcaaacggactgaaaaccgaatgaaaatacgtcgataatgcagtgcgtattagcaaaatgctaactgtggaaatacagaaaaagtgattggtcttgaccacaaaatgccaaacctgtgattagcaattagcaagcagccaaccacaacagaaaataaaagccgaaaagcccgattttactaggcttttccgaaattatagtgttaatcatttctttttttgaaatctgctaatattatgccgtttttccattcgttttagcaaggtattagcaaacgcaaagatttttggggaacatcattaagttaataggatactcgttacgagtgctaattcacagttgaattttttgttctttttatattagtataaataaaatttaacttaaataagtcatagagatatctgtattcagttttcaaaatacacaaaatacaaatgaaaggcttccattttcgtggttcggaattaactccttcacttgtttgaaccgggagggcgtttttgggggtgttttttcaaaatttcttgaaaaaattttttgtaaacaaaaagccgcctatttccctcgtaatcgaggtcaatagacggcgggtagaaatattcataattttggtgtataataggaaattaagagaaagataaatttgaatttgtggaggataatatgaaagtagatgtcattaagaaatattttcagtcttggttagataacgatgttgagattgtaaaacagactttttctgaaaatgctttgtatagtgaatgctatggacctgaatatcatggcttatcacaaattgtaacatggtttgaaaattggaataataagggacaagtattggaatggacaatcaaacgaatatttgagcaaaaccaaacgttaattgttgaatggtacttcagatgtaattatgatggtaagatagatggctttgatggtgttacaatagcagattttgataaggatatgaaaatattaaaattatgtgaattttagtcgaaggcagaacactactatccatatgaatcatgatctaaattccagtttgtcgaacttactctaaattagcaaagaccgcttacaaaagtgtaggcggtcttttttcgtgtttagatatatttgattttgagctttcttttcttggctgaaagcaccttgcaaagaatatcatctactgcgtccgtgtatctgccttgtgctatcaggctgttcttcaaacggataagtgattgcaacactctcctgtattcttcatcggagcagagagggtattttcattagcaaaattgcgaaaaccctgccgatttttattagcaagcagtccacctgaaaggcggacgacattagtcccaatttccattagctgacggaggatttgctaatgaggttttctgcatttttcagtttcattgtctttgaactaaaataaaaaaagccgaaaagcccgattttactaggcttttcggctgtgcttttggcaccccctgcgagaatcgaactcacaactaacccttaggagtatggcttaccatgtgatacacggttcggatgtaacttccaatatcatcccttacgcagaatgacttgtagtaaacgaactttatgatgcaaaacacctattctgacgcagttttatgtgtccgttgggtggtcctattagcaaattcttagcaagaggacacccagccaaagccgattgctactgccattcttcactcccttagtcaaaatgacaaggcaaatacatggagattactatggacaagaaagagaaaaagtcactgccggaaccgcgcacatataccgtggaacagattgcggctatgctcaacattggccgcacaaccgcatatcagctcgtcaagcaggaggagttcaggatcgtccgcataggaaatgcgatccgcgtctccaagaaatcttttgacgagtggctggaaagtttggaattgtgaatatcgcaagaaacgccgtaggctcaaaaaacctatggcgtttttttatacccattttgaaggaggctggcaatgaaattgacagaagcagaaatgaggatggtgtttcagattgaaagtaccaatcagaacgctgccctgaatgagatttacatgacatggcgctacgcgccgaacccggcaacgaaagaaacggcggaaggccttctggacaagctccgtcccctgtcggatcaggagtgcatggatttgatccgcaaggtgcaggccgaataccgtctgccggagaaagcccgcaccatcggggaaatgctggcagaggccagacagcaatccggggcgcagaagttatctggtcatgacattatggctttggagcgtttcgacccggcaaccagacacatgatcgtctttgatgttcttacccatgactcgcctgttggctggaagggtgagaaaatgcgcctgttcctgactgacgccggatacagtaaggctttggaaaatcaggaaaaggggcatatcaaaatccgcaaccatgcgaaggtgctttccggcgatctccactatgaccataaagaccgtgagaggtagccgccctaaaaatgtatcaaaatcagtgggatatcttctgtttcttcctctgtagcttgcgttctgaacagggcgtggatgttttcccatgtgggaggctatggaggcgtacagacggataaaccgcttaaaatcaacactttttattttcacaggaaggaggtgtgaagatggctgtttttcgtattgaaaagacccgtgattatacggtcatgtcgaaccatcacttgaaagatcgaacgctgaccctgaaatccaaagggctgctgtccatgatgttgtcgctccctgacgagtggaattacaccaccagaggtcttgcggcgatctgtcgggaaggtgtggacagcatcggtgcggcgttgaaggagttggaaacccacgggtatatccggcgcacccagcttcgggatgaaaaaggcaagatcacggataccgagtatgtcatttacgaaatgcctcagtgcgagccgccgtcaagcccaggtacgcctttaccgggtacggcaaagccatatacggaaaacccggatatgggtatcccggatacggcggaaccgtgtacggaaaaccccgcacaattaaatactaatcaaacaaagactgatttatcaagtacggagatatcaaatcctatcccatcaaatccccctacccccacaggggcaaggatgggaacggatcagatgggagccagagaatgttatcgtgaagtgattttggataacatcgagtacagctatctggtgcaggacaatcatatcgactgtgagcagcttgacgagattgttgacctgatcgtggataccgtgtgttctgcccgcaaagtcatccgcatcgccggagacgattatccggcggaggtggtaaagtcccggtttatgaagctggacagttcccatgttcagtatgtcatggactgcatgaaggacaacaccacctatgtccgcaatatcaagaaataccttctggcggcgctgtataacgccccgaccaccatcaacagctactattcttccttggtacagcacgatatgtacggggacgggcaaagggggcgaggctaaatgcaggaggaagtaacgcggggcgccgtaacgctcattgttgacggagccaagctaagtgagcaggtctttgaaaaggccgtcaaaaagttcctggaggaaatccagaaaagccagaagcccaaaatctaccgcggcaggcagagccttaaacagcttgccagccagaacgcaggtcttgccaatatcgagatcagcgacaagaatatcaaggctttctcccgtgtggcgaagaaataccatgtggattttgccttgaagaaagacacctccgcagagcagccccgttacctggtctttttcaaaagccgggacgcggatgccatcacagcggcgtttcaggagtttgccagccggaaaatgagccgtgaggaaaagccctccatccgggagcggctgacccaggcgaaggaacaggcggcagagaaaacgaaacaccgtaccattgaccgggagaaagtaaaggtcaaagatcggagcgtgcagagatgaatatgaaaaaaatgtttttgctgaaccttccgtatcttctgttcgtgtatcccttcgataagctggcacaggctttccggcttgcgcccggcgctgacctctccggcaagctgctttctatcgggggcggcttcacggcagcactttcctccccgtggctcagtttccatcccacggacctgctgatcggcatagccggtgcggttgtccttcgtatggcggtctacctgaaaggcaagaacgctaagaagtatcgccacgggatcgagtatggttctgcccgctggggtacggcggcggatatcgccccctacatggacaaggactttttccaaaacatccccatgacgcagacggaacggatcacgatggcgagccgtccaaagcagccgaagtatgccagaaataaaaacattctggtgatcggcggttccggcagtggcaagacgcggttcttctgtaagccgtcgctgctgcaagcccattcgtcctatgtctgcaccgatccgaaaggaaccttgctgccggagatcggcactttcctggaacggaagaaataccgtatcaaatgcctcaacctgataaacttccgaaaatccatgagatacaacccactggcctacattcgatcagagaaggatatcttaaagctggtgaacgccctgattatgaacacgaagggcgaaggcgaaaagtcttcggaagatttctgggtcaaagcggagcgcctctattattccgcgctgatcggctacatctggtacgaggccacggaggaagaaaagaacttcatcacgcttctggaccttatcaatgccagtgaagccagagaggatgacgaaacctatcaaagcccggtggacctgctcttttctcagttggaagaacgggagccggaccacttcgccgtgaagcagtaccgcaaattcaaaatggcggcgggtgttgtatgctctaaaagacttcttaatcaagcggttgggaagtctcttagaacacacaacctaaaaccgaagaaaggagcgcaagttatgagaaaaaacgagaaaatcacagctctgtacgaacgattgagccgtgatgactttggcaaagatgatgaccaacagcgtgagagcaattccatttccaatcaaaaagctatgttggaggagttcgccgcacggcagggctttacaaacattgtccatttcacggacgatggtatcagcggcacttgttttgaccgccccggatttttagccatgatgaaagaggttgaagccgggaatgtggaatgcctctgtatcaaggacatgagccgcatgggtcgtgactatctgaaagtcggtcagattatggaaatcctgcgtcagcgtggcgttcgccttatcgccatcaatgacggcgtggacagtgccagaggggacgatgattttacccctttccgcaatattatgaacgagtattacgccagagacaccagccgtaaaatccgttccactttccagtccaaaggcaagtccggcaagcacctcacaggcacagtcatttacggctatctctggaacgaagccagagaccaatggttggttgaccccgaagccgccgaggtggtcaagcgtatctttgccatgacgattgagggctacggtccgtatcagatcgccagcaagctgaaagaagaaaaaatcctcattccgtctgcttaccttgcccaacacggcgagggcgtgaacaaaaacaagactttcaaagatgtgtacggctggggttcttccaccatctgcaaccttcttgaaaagcgtgagtatctgggacacaccatcaatttcaagacccgaaagcacttcaaggacaaaaaaagccattatgtcccggaggacgaatggacaattttcgagaatacccatgagcctatcattgaccagcagacctttgaccttgtgcagaaaatccgtgggaatgtcagacgctacccagacggctggggcgaagcagctcccctcacgggcttgctctattgcgccgattgcggtggcaagatgtatgtccaccgcaccaacaacggcaagcgtatttctcaatatacctgttcccaatacagcaaagtcccagttggaaagctctgcacgacacagcaccgtatcaatgaagatgtggtactgtcccttgtctctgaaatgctgaaagccattgccgagtatgcgaagcatgaccgagccgagtttgtccgtgtggtgcaggaagcgcagtccagccagcagacggcagaggtcaagaaacagcggacacgccttgccaccgcaaagcagagagtttccgagctggaagtcctgctctgcaaaatctatgaggacaacattttaggaaagctgtccgacagcagatacgccactctggacgctcaatacgaaaaggaacagtccgagcttaccgttgaaatctccgatctggaaaaggctatcaagagctacgagaagcacgaaaaggacgctgaccgttttatcgctctgattgacaagtatgagaacttcgacaagctgacgattgccatgctcaatgagtttattgagaaaatccttgtgcatgagcgtgaccgcaagggcagtattcagaccacacaggaggtcgagatttacttcaatttcgtgggtcgtttcgttccccctgcgtttggcgaagtggagcttaccccggaggaattagaggaaatccgcaagcgtgaggaacgcaaggacaggctccaccagaactacttgaagcggaaagccaatggtaaacagaaagagtatgaggagcgcacgaaagccaagaaaaaagcgaagattgaagccagaaaacaggcaatccgcaccgaggatattgccagaggggtatttatcccggtgagcagtttgccacagctgggaccgagaaagggagcgtgattttatgaaagagttgaaaccgagaatccatgagaacggtatggactatgtgttggtgggcgactactatgtgccggacttgaagctgccggaggaacgccgacctattgggcattggggacgcttgcgccagtcctatctgaaattgcaccgtcccatgctttacaacgagctaattttgtccggcaggctccacaccgtcgttgccgatctgaacgagcaggcggcagacaggctggacttgattatccggcagatgatgaaagccgagggcgtgaccgaagccatgaaagcggaaaatcagatgttatgggtgcagtcaatgaactccatccgctgccgggcagaggaaatcatcaagacggaactaatctactgttgagagaggtaaagctatgattttggaagccatgtataatggggagttttatccctgcgagacagttgtacctacatcaccggaataccgaaaggcagtcatagcctgtgaaaagctcatggagcagttgtcccagcggctcagcaaagaggactatgagctggtgcaggaactccgggcgcagacagcaatcgcccaatgtgaagaaagtgaaagtcacttcaagtatgatggcttttccgctgggctgatgttcagcaggaagcccatgaacaagtgcagcagaagaaagaaaaatagatgaagaaagccgcctgagcagaaagaaactgttcgggcggtttcagcattcgccagtagatttattcacactcttgtgataaaatttactacaataaagagcgtgatagcactaattttatggggggatgcttaatgaatagaattttgaaaaaatttttacagcggggtgtcgatttaagtcctgtgggagttgaactccgtgaggataatacaaattatttttgtaccccaaaaggggcatcggtttttggatgggcagggatagatggtatccacttctgtttcattcgtggatttggagagatggttttctctgtcagccccatgaatacttctcctgattatgttcatccagtagctgaaaattttaccgactttctgcggcttatactggcttgtggtgatgtggcggcagtggaacaagcgtggatgtggaacgaagcacagtttgaagcctttctcaatgaaaaccctacaacccaggaacaacagcaaactttatcggaaatttcagagaagatgaatttgttgcctatggaacaaccgtggacatatatcaaaaacctgcaatcttcctttgattacagtcagattaaatacacagaagattattacgataatgatatgacttcagaggcagaattggttgcccctgaatggaaggtctactttgatggagatttctggggacatcgaggtaaagaccgtgccggaaaagagatcaagctggataaacaattcgattgggctggatatcattgggtaattccggcagcttattcatgtagcaaaggacttgtcgttgatttttgtatgcgagttgattcagaaagcatccgtgacttcatgaaaaaatggaatctggactgggaaaatgactcatgtgaaaattttacccgtgagcaacagatgcagatggaatgggaaaacccactttgttttaacttcaaaccttgcttgaagttaaacgagaaaatattacagacaacccatggctgcgctgtgagctttaatccttgtctgccagatggcgttatcaatgagttggaagcaaaatgggcaatcgaccattatgggctggatagtacttatggctgggtcatatgcagagacgtatttccttggggaaccaagcatcaccctgaaatcaataaactttttcttacaatggagcagcaaccaggacaagttccaggctcacatttcaaagttcacgcacccggagattcatttatgttttcccatcctgttagcggaataacccatacactgaccgtgcaggaaatagaacagcagacagttcctcaaaatagttttggttctgatcgctggatttatccgacacattatattgccatgagttatacacttacccctgaaccgatggagaacatttcggtttttgactgtgatgaaggcgatagaccgatagaagttacaccagacgatcattcgttccgtccagttggcagtagttcctgttttgttgttggtgttattggtggtgcagatggtccgacagcagttatatatggaacaaattcacaagaaaaacttcatgctgcttgttctgctctgcactttgaaccggttggtgatgatgtcgagtggcgtatcgtgttcaatgttacgcagtttgacaaagaaacattcccaattatctaaaaatacccttagaactctaagggcgcacttctatactctctgtcgagagtagtgcgtcctgcggagcttcattctccgtcagcagaagaaaactgcatgaccgagaatgttgcgtcacttcgttccgtcaaggtggctacacccccttgcgccgctaaagcggctatcccctgtggacttgccgtccgcaaacggttttgacaaaccgttcgccgccagcaagtttgaaaatcaagaatcttaatttgataaaggagtgtgattctatgaaaaagaaattacccataatcctcttgggtgttattttggcttgtgtgttggttttcggtttcctttatgcaaacaatgacattggtaaaaccgcaaacagtttagaagcagacattcgccaatctcaaaaaattttggatgattggattgttgatggaagcatttccgacacaatggctgcatttatttcttacccacaggacaagacagaccacactttttctgtctatgtaaatcgccctggcttgtcttttggatatttcttccgtggtggtggagatatagttgaggttgatgattacattgcagagtttgttgttgagggaaataacgaaagggcatttatctcaatgaatacccaaaatattgttcgacttgaagtggatgatggcaacggcattcaggtgattgatattgatagtggcaagcctttcgccattgtcctgcccctcaatgtaggaaacatctgtttctatgatacgaatggaaatgttgtggaatatcttcgccaacaactttgaccaacttcaatttaccgaactgaacacaacaactgaataccgaaaaactgaccgttgactggtcgcaatctgcgaaaagttgacggtctttttttttccccattttcaaaaaaggaggtcacgaaaaatggcaaaaccgaaaaaccttgaacagctccgagccgaaaaggaacaggtcgagacacagcttgcacaggaacagcacaagctggagcgtctggagaacagaaagaaatatctggagaaaggcgagagacaaaagcgcacccaccgcctttgcaatctgggtggcacgattgagagccttgccccggaggtcaaagatctcacacgcaccgaaatgacagagctgatggaacacatcttttccctgtccgaagtccagcgagccgtctggcacatggcgattactcacaccaaccaagcgaacagagaaaaggagttgaaagccgatggcactatttcatctgagcgtcacgcagactaagcgaagcgcaggacagtccactattgcttctgccgcctaccgtgccggggagcgattgtatagcgagtattacggcgaatacagcgactacacccgcaagggcggcgtgatctgctctgacattctcctgccgtcccatgcaccgcccgaatatgcagaccgccgaccctatggaatgccgtggaaaaagccgagcgtggaaagaacgcccagcttgcatacagctttgacattgccttgcagaatgaattttcccttgaggaaaacatcgctcttgcaaggcaatttttgttggagaactttgtgagccggggcatggtggttgacttcgccgtacaccagccagaccgggaggacggcggcataccaaacccgcattttcatgtgctttgccccatccgccccatcgagcagaacggcaaatggggactaaagcaacgccgggtgtatgagctggacgaggacggcaaccgtatccgggacgcagacggaaagtttgtgttcaacgccgttcccactaccgactggggcagtcccgaaacgctggaatactggcggcagacatgggcggagctatgcaacgccaagtttgcggaaaaggggcttgacattcgtatcgaccaccgaagctatgagcgtcagggcgtggagcttcttcccaccgtccacgagggcgcaaccgtccgggcaatggagaagaaaggcatacgcaccgagaaaggcgagttcaaccgctggatcaaggcaaccaatgccgttatccgggacatcaagaagaaaatcgctctcctgttcgattggattgccgaagcaaaagcggagcttgccaagccgcaggcacccaaccttgtttctctgctgaacgcctattacaccagccgcagagccggggcatattcgcagaaaggtaaggtcagcaacctaaaggagatgaacgagactttcaattatctccgggcaaacggcatttactcccttgaagatttggaaagccgtgtcagcgaacacagtgctgccacagagagcttgaagaaaacgctggacgaacagactgcccgaatgaaagcaattaagcagctctatgacagctccgctgctttccagagcttgaagcctgtctatgacggcttgcagaaaatcaagtttgagaagcccagagccaagtacaaggcagagcatgaagcggaactgaaacagttctacgccgccagacgtaagctgaccggagagttcccggacggcaaggtggatatgaaaaagctgaccgaagagtatgacgagctggaacaggcgcacaacaccacctatggcgagtttaagaccgtcagagacgatttacaccgtctttggaaggtcaagtcatgtgtagatactgccgcccgatttaacgagcgtacagaggaacaactgcaccaaaatcgaccccaaacacgacacaaaaaggaggatatatcccgatgaattacacccaagcacagattgaccgggcgaacgccgtcagtctggaagattttctccgcacacagggagagacgcttatcaaaagcggacgggaataccgctggaaagaacatgacagcctgaccgtccggggaaacaaatggtttcgccacagccagagcaagggcggctatcccattgattttgtcatggagttttacggcaagtcctttcccgaagcagtccagctcttaaccggcgaaagcgccgagggacagagcgaagccagcacagcaccgcccacagcgtttcacttgcccttgcacaacagaacagccgacagagcaattcaatatctttgcgaaagccgaggtctcaacaaaacgcttgttgaggcttttcttctttccggggatatttacgaggacgcaaagcggcacaatgttgtgtttgtcggcagagaccgaagcggtacgccgagatacgcccatgtgcgaggaacggcagacccattcagacaggacattgccgggtctgacaagtcctatccgttccgctatgagggaaacggcaatcagctctttgtctttgaagcaccgattgaccttttgtcctttatctgcctttatccgcaggactggcagacaaggagctaccttgccctgggcggcgtttcaggcaaagcccttgaccgttttctttctgaacgcaaggacacccgaaaagtgttcctctgccttgacagcgacaccgcaggaagcgatgcctgtacccgactggcacagtccattcccggcgagatcgccgtcattcgccttgtcccggcaaggaaagactggaacgatgttctccgtcagcaaggggacattcccagccgcaaattcatagccgagacaatcacgctgcgagagctgcccaccgcccagcctgttcccatgctccgcatggcagatgtggagctgacgagcgtggagtggctatggtttccgtatatcccctttggaaagctgacgatcatacagggcaaccccggcgagggcaagacctactttgccatgcgccttgcggcggcttgcaccaatcgaaagcctttacccggtatggagacccttgagcctttcaacatcatctaccagaccgcagaggacggtctgggcgataccgtcaagccccgactgatggaagcggaagcagaccttgaaagagtgcttgtcattgacgatagggacacaccgctgacccttgccgatgagcgcatagcaagggcaatcagggaaaacaacgcaaggctggttatcattgacccggtgcaggcgtttctgggcgcagatgtggacatgaaccgggcaaatgaagtccgtcccattttccgcagtctgggagatattgcacaggctactgggtgcgctatcgtgctgatagggcacctgaacaaagccgcaggaacacaaagcacttacaggggcttagggtctatcgacattacggcggcagtccgcagtctgctctttatcggcaagctgaaggacagccccacaacgagggtgcttatccatgagaaaagctcccttgcgccgcccggacagtcccttgccttttctctgggagacgagaaaggctttgaatggataggagcttatgacattaccgctgacgagcttcttgccggaacagacaccgccaagaccgagagcaagaccgcacaggcgcaaatgcttattctggaactgcttgcggacggaaagcgtatgccgagtgcagagttggaaaaggcagtcaatgagcgtgggatttcctcacgcaccatgagaacggcaaagagccgtatcggggacagacttgtgaccgagaaagacggcacagcatgggtctgctatctccgagactgacaacaggaacacggcaagcgtggcaaagacggcaaggtttttatagataccttaatgttgccgccttgccttcttccctcataccgatcaccgcccgatgatgaaaagtcaccgggcattttttatttacaggaggattttgaatgaacaataccgcaaccaacagtaccccttgcccgactgtcagaaagcagattggcaagaccacctatatcgtccgtgtccatttcagcgagaccgccaaggagacgatggaggacaaaatcaagcgtatgctccgtgaagaagtccgcaaaatgtgacttctttttgaatttgatgaaaaagtccttgacttttcgtctctggcaaaaccttaaaatccatcctcatttcctgcggtgcccggcttgctccctttgatatcaaggagctgcgggacctgatggagtatgacgaactggaactggataccctgggcgaccaaaagacggcgctgtttgtgatcctgtcagatacggacagcactttcaatttcgtggccgccctcatgtatagtcagcttttcaatctgctctgcgacaaggcggatgacttctacggcgggcggctgcctgtccatgtccgtttgatcctggacgagtttgccaacatcggccagataccgaacttcgataagctgattgccaccatccgaagccgtgagatatcggcttctattattttgcagtcgcagagccagttaaagaccatctacaaggatgcggcagataccattgtcggtaactgtgacagcactttgtttttgggaggcaaggaaaaatccacgctcaaggaaatttcggaactgctggggaaagagaccattgatctctataaccagtccgaaaaccggggcagccaggtttcccacggcctcagttatcagaaattaggaaaggagttgatgacccaggacgaattggcagtgatggacggcggcaagtgtatcttcatgctgcggggcgtgcgtccgttcctttcggacaagtacgacctcacccggcacccgaattacagatacacggccgacgccgaccctaaaaatgtctttgacatggaacggtacatgaagaagcagcgtgccgtggtaaaacccacggacaccttcgatgtgtacgagattgacgcaacaacttaacccaaaatcaaaaacattttttaggaggattattttatggaatttttcaacagtgcagttggtgttttgcagactctcgtagtggccctgggcgcaggtcttggtatctggggcgttatcaaccttctggaaggttacggccaggacaaccctgcttccaatgctcatgtgccataaagtaacacacaagaagttgatagacaacagcccgttattccgtaaaaatttcaaagtagaatttcatggaagccatacaaattgtgtggcttcttttgcttaataagcaaagataaattttctaataccctattgacaaaagcgtttgccttgaatataatgtacttgtacgataagtacattatagaacaaaggaggggcgttgtggaaattatcataagcagtaatacgagcaagccaatttatgagcagataacttcacagataaaagccatgattatgagtggcgagttaaaaaccggcgatcctattccctctatgcgggcgctggcaaagtccattcatgtgagtgttattaccgttcaaaaagcgtatgaagatttgcaaagggacggttttattgaaacaacggtaggccgaggaagttttgtgtcggcacagaacaaagacttttatcaggaagaacagcagagattggccgaagaacatttgcaagaggccgccgatattgggcggataagtggaatatcgttggaaaaactgattgaattactgacgatattttatcaagaggaggattaactatgaacgctattttgcaggttgagaacttgacaaagcaatacgccgatttcaagttagaccatgtttcgttttcggttccgaaaggaacaatcatggggcttattggcgaaaatggagccggaaaaagcacaactatcaatgctattcttgatttaattcataaagatgatggaacagttactttttgggggcaggaattatcgtccacaaaacaaatcaaagaggatgttggcgtagtgtttgacggaattaacttctatgaaacgctcactccggccaaagtcgggaaaattgctggtgctgcctacaaacagtgggacggccatctgtttcaagactatctaaagcggtttcaacttccagcggataaggaaattaaatctctgtccaagggaatgaagatgaagttgtgtattgccgtcgccctttcccataaccccaagctactgattttggacgaagcgacaagcggcctcgaccctgtaatgcgtgatgatattcttgatgtatttcttgaatttgttcaggacgaaaatcattccattttgatgtcctcgcatatcacaacagatttagaaaaagtcgcagattacattacatttatccatcagggcaaggttcttttttgtaaaacgaaagatgaacttcgttataactatggtattatccgctgtggcgcagcactgttcgaccagctcgataaagcggaaattctggcttaccgcaaagatgattatcaatggaatgtgctggtagctgacaaggaaaaagcccggaggaaatataaaaatgccgtagtggacgacgcaacaatcgacgatattctgctgctgtatgtgaaaggagagcaagcaaaatgaaaagtcttgttttgaaagatttatttaatatcggccacaatgcgaaatctatgctattcatccttgtggtttttgccgttgcgcttattccgttttccggcgtagaaggctatatttttgtatgtgcgattttgtgcagcatgatgattgtaacaaccttttcttttgatgacagttctaaatggacacggtatgctatgataatgccagtttccaagaaagaattggttgctggaaaatttatggtgctggctatcttctgcgccattggcagcctctttgggctgattattggttttatcggtggcctaatcacagataaaatcgtactcgacatagtagggattggagagcttctgtttttgacactcgttgcatgggtaatctcccttatttttggaagtatgtcaattcctcttgtgttcaagtttggcgcagaaaaaggccgtgttctgctattagtatcattcctcattccggcagggatttgctttggaatatatcagcttcttactatgctgggagttgcattgacagaccagattgtatttattcttctctgctgctcaccgcttctggcgttggcatggtgctatgtgatgtatcaaatcagttatcgcatttttgtaaagcaagagctttgatttctattgggaggtatctatatgggaagcagaagatttgaaattactgaaaccgcaggaagtgtgaaaggcttttatgtggtagtggacagagaaaccggggtcaattaccttgtggcaaagtttggaactggcgggggtatttgtcccttgattgacaaagacggaaaaccgattatcagcgagtagcaaagccagccgagccagtcaacggtcaagataaacagcgcatactgcgctgccgttgacagccccgcccgcctttgcagataggcaatcaaggggcgacagcaaggagtgctgccgccctttcccataatcgaagaaagggggattttccatgactgaatacgaagcctatcaagaacatatccgctatacccatgatacctattgccggattgttattcgccatgcgtcctttgacgctgcccgtatgctggcggcgagatggaaacgggaaatctcccttgaatatctgaccgaagaaaagtttgtccaactaagcaccacagacgagtattttcaagtgccggactatggcgaaacttatccgttctctgtccgggggcagacgatacttttagatagctgttctcttgcggctgctcttgcccgattgccggaacagacgcaggaagaaatctttttgtactactttcagcacttgacgcagaaagaaatcggagaacaaagcggctggacacgcagcacaatcgggcggcatatacggcttgccttgaagcggctgaaagaggaaatggaggtgctgtcccatgagtaaccgacttctcccctatgacactatcataaaggcacatgagggcgaccccatagcgatacaagccgtccttgaccgatacgctggatatatccgctacttctctaagatgaacggctattacaactctgatatggaggactacatcagaacaaagctgattgaaagcctgttcaagttccggcttgaccgataacatagaaactgaatatcccgccgccccgcagcggcacatgaagcagtaaatccgaaaaagatttgctgctttttttgcgctcatttttggcaaatttccaaaagttccgtattagatagtgaaaccaaaaaatgccgttttttttagacagcgggcaaaacgcagcttccgaaacgccttattgtcgggaaagaccgagccgccggaaaagttcttgccggaaagtccgtcatttttgctttttgcggtgttgtagggagtaagggaagaacgccagcccgcagccttttataaaaaagctggttgcgatttcctgaaaaagtggcagtaggaagtgagtggcagtctggcagtttcttagagcaagattctaccgcagtaccaaaattcgcttatcgctcattttgcccctgcgggaatcttgttggagagtgccttccccaaaccctgccatgtggcttacgccgcttaaaaatccctcaaaatattttttcggatttttcaaaaacagttccgcttcacaccctgtttttctcctattagtgagaggacaccacgcacagaaaggaggtcaaccacctatgaaacgatacaacacgccgcaccgcagccgggtagtcaagacacgcatgaccgaggaagaatacgccgagtttgcggaaaggctttctgcctacaacatgagccaagccgagtttatccggcaagccataaccggggcagccatacgccccatcataaccgtttcccccgccaatgacgagctgcttgccgctgtcgggaagctgaccgccgaatacggcaggatcggcggcaacttaaaccagatagcccggacgctaaatgagtggcgcagcccctacccgcagcttgcaggggaggtacaggcagcggtttccgaccttgctgccctaaagtttgaagtcttgcagaaagtgggtgacgctgttggcaacattcaaacatatcagctctaaaaatgccgactatggcgcagcggaagcctacctcacatttgagcatgacgagtttaccatgaagcccacccttgatgaaaacgggcggctgataccgagggaggactaccgcatttcttccctcaactgcgggggcgaggatttcgctgttgcctgtatgcgggcgaatctccgctatgagaaaaatcaaaaacgggaagatgtgaaaagccaccactatatcatcagctttgacccacgggacgggacagacaacggcttgaccgtagaccaggcgcaggagctgggcgagaagttctgtaaagagcatttccccggacaccaagcccttgtatgcacccacccggacgggcataaccacagcggcaatatccatgtgcatatcgtcatcaactccctgcgaatttatgaagtcacgcttctgccctacatggacagaccagccgacacacgggagggctgcaagcaccgctgcaccaatgccgctatggaatatttcaagtccgaagtcatggagatgtgccaccgggaaaatctgtatcagattgaccttttgcatggcagcaagaaccgagtgaccgagcgtgaatactgggcgcagaagaaagggcagcttgcccttgataaagagaacgccgccagagaagccaccggacagccgaccaagcccaccaagtttgaaacggacaaggcgaagctgcgccggacgatacggcaggcactttcccaagctaccagctttgacgagttttcttcccttttgctgtgggagggcgtgaccgtcaaggagagccgggggcggctttcctacctcacgccggacaggacaaagcctatcacagcccggaagctgggggacgattttgacaaggctgctgtccttgccctgctcacacagaacgcccacagagccgccgaacagaccacagccatacccgaatacccccacacacaaaagggacgcttgcgggaggaaaaaaccacaaaaactaccccggcagacaccaccttgcagcgcatggttgaccgggaagcaaagcgagccgagggcaagggcgtaggctatgaccgctgggcggcaaagcacaacctaaagcaaatggcggctaccgttacagcctaccagcagtacggcttttcttccccggaggaattggacgaagcctgttctgccgcctatgccgccatgcaggaaagccttgcagagctgaagcaggtggaaaagacgctgaacgggaaaaaggagctgcaacgacaggtgcttgcctattccaagacccgccctgtccgggacgggctgaaacagcagaaaaacgccaaagcaaaatcagcctaccgtcagaagtacgaaagcgactttatcatagcagacgcagccgcccgctatttcagggagaacggcatttccaagctgccgagctataaagccctgcaagcagagattgaagcccttatcaaagagaaaaacagcggctacaacgattaccgggcaaaacgggaggaataccgccgcttgcagactgtcaagggcaatatcgaccagattttacgccggagcgagccgcaacgcagaaaggagcagagccatgaacggtaatatcccccgcatggactaccgccagtaccgggcagcccgccgccttgtgcatgagtgctgcaactatgacagcgggaattgtctgctgttggaggacggcgagccttgcgtgtgtgtgcagagtatcagctattcgctgctctgccgctggtttactgccgctgtcctgccccttgatgaagcactggaggccgccctcatgcgccgggaaagccggaaacgctgcgctgtctgcggggcgttctttgtccccaaatccaaccgggggaaatactgcccggactgcgccggacgcatgaagcggataaacgccgccaaacggaagcggaaacaaagggagaaatgtcacgctttagggcatttcaaacccgcataaatcaaggcttttttggagggtgtcaaagggtgcgtgatacatttatccttttcccccgaaaacgccccctaaaagcgtaacagaacccatagacagacaccacaaggaggtgaaccctatcgctgattat

SEQ ID NO: 6 - DNA, 5962 bp, Intestinicoccus colisanans
  source 1..5962: mol_type = genomic DNA
gagccgacaggccccgcttgctggtacatatccacgccgggatttgagggtgtgtgtccgttggcctgttcgtgaaggtatgaaaacaatccggcagatagccgacgagataggcgtatcaaaacaggcggtttataagcggtacaaaggcaagctgtatacggtttgcgctccgtatgcgcatacggaacagggggtcttgtatctatcggagcaggctgaaaccctgataaaacaagactttttgagagatggctgccccaatggatcgcatacggatacgcatacggagcgctccattggagcggtgccggagcagtcgcaagaggctggtgtggtagcaattttacaggccaccattgacacgctgcaagggcagctttctgtaaaggacaagcagattgaagaattgaatgcaaggctggcagaggtcagctctgcgctggtggtggcacagcagactgcccaggccgcccaggcacttcatgccggaacaattcggcagcagcttactgatggtgaagatgatccaaatcaacaggggcagacggtggagcagaaaaaaagctggttttcaaaagtttttggtggcagataggaaacaaaagtatatttttttcgtcagtacaagtaagaaaggcggtgtgatacagtgaaaaagattgttcttgttttggtggcggctatggttttggtattcactggttgtgaaaaaaaagaaactatttctatgccctttgatgttgctgatgtaaataacattgagatgtatcgcaatgctgagccatactccgccgaaaagcaagttatcacagaaagcgaagacatagctgatctttattctctgttttcgggactggaggtaagcgataagaaaacggagcctgttgtcggggagaccataacgagttttaggttcaatctctcagacgatacaagttatgagatcatctactgtgcggaagctgtaaagtcaggcagactgaaatttccggcggagaaactggattattttacatcagccgatattggaggtcgttgggatagctatcaatatgagattgttcctgtaagtgagagtgagctgccggggcagtcagaaaatccctctgatccgccgcttgaagaaacgcatgaatgggataaaatccctatggtaatggtggatggaaaactctactatgatacggggaaagaaagcaccataagtggtcgttgcggggtaatggacggggaaattacttcaacggttgatggctctgagataccgacaaaggataaccaatctaattttgggacaggctttgaatatcaatacggggcagacaataccatagagatttttatgaacgagaaatggatcgtttttgagcaaagagaaggagacggaagtaaagtccgatatggtgatcggatggtggatgcggaggacctttccaaagaaacgcttgaatggctggattggtataatagcttgccggaagaacagcagttggctgtaagttttgtcccgtcggatttgattgaagaaaccggccctgtaaaaacagaggacgcagaagttcctgcacaggaagaagaattatgcggttatcctcttgcaccagaagaagtagagtgacagaagaagttcttagagatggttgtgaggccggctcttttagcccccggcagggcgcaaagcactttcatactgccagccccaaaggggaggcggtgtgaaagtgcttttgcgttactttctcaccagaaagtaacaaagaggttgtgacagccacccaggtatggtaaaatagagatagtaggatatagttctttttacaagaaagggccgggtgattttatagaaacaaccatttcgggaatgacaggccgaggaagtattcggcacaataacaggagcttttcggcggcgaatgtagaccgcagccggtcggagcagaatatcactttttgcaacgatgacttgaagcaggtgtaccatgagctttttgatgaagcattggctgcctataacgctaaaaagaaaaagaccagggacaaaataccagactactatgagcatatccggcagagcaaacaggagaagctatttcacgaggccatcttccagatcggtaacatggaggactgtgggtgcggctccccaggaggggaacgggcagcggcagctctcaaagaatttgcagagtccttccaggagcgcaatcctcatctgcgggtattcaatatggtgctgcacatggatgaagccacgccccacctccatgtagactttgtgccggtggccactgggcagagccgggggctgtccacgagggtttccatgaagcaggcgttaaagcagcaaggatttgaaagcctgggccgaaagcaaaccgaatggaaagcctggatggagcgtgagaaggtatctcttggagagattgctcaggtacacgattttgagattatcagcctgggcggtggtcggcctcacatggatttgccagagtaccgggcagcggcgcagcgccttgaagctgtccaggaacaggttgcagcagcagaacaggatatagcaactttggaaaagcagaaaaaagcgttgcaagggaatgtgaagctcctaaaggcggttgagaaggtcaagcctgatctggaggccatacagccagaaaagacgctgacaggagctgtgaaaggcgttaccgtagaacaggtaaaggaactgaaggcggcagcaatcagaggtgcggcagcggaacagaaagtgcaagagctgaaggaagaaaatcagcggcttcagcagaaaatcccctcgacaaaagaaaagctgaaggaggctcaggagaggcagcggcttgaaaaccaaaaccgaaagctgctggtacaggtggagtgcctggaacaagagttggagcaggagcgcagcttctcggatcggctcctggatggggtcagtgcggtgatggattttctggatcggcacctgccagagaagttccgcccccttgtcgaaagggccagggagctgttgcctgtgccggaggtgcagcagccagagcaggagcaggaacgaggtcatacctggggcggcatggagctttgataagatagggaaaaactgtattgataatatatgcctgtccaggggacttgaaagcgccatctggacaggctataataacaacaagaaatagggaaaaaactcattgataatatatgcccccctatggcctttaggccaaggaaaaataataaaaatattctctctcggatagggagaaagtcggaggggaaaatgggggtgagcgacggggtgtgggaatgtggcaaacctaaaaggttttccatcatttccatgccccagagcgagggggaaaagggggaggtgactttctctttaaggccccggaggggccgctctttggctcccccttttccccctgtgggtttgcagaatgtatgaaaagaggtgtaaggaatggtggatcagcaagaggctttggaacggcagagagagctttatcaggaaaagaatgagcatttggaaaggtttttggagccggtggcgccgtatgagttttatcgggagatattcccggagggttctttcgagaggaagggacattttgaggacaggaagggaaacgggattgcggtgacggttcagaaagttgaggttgataaggcgaccgggatcgccctgcagatcgagggggatggtaaggcgaaacggtgtactatcactgacgagctggacgaactgcgggagctacaagacactgattttacgattatgtccccgatttcctattttggtctgcggcggtgcggtaaaaatgccaggtatctttatgctttggtgtttgatctggacggggtaggtatgccgcagcttcgggacacgctgcaccagatgaacaaggatattctgccccaggcaacctttgttgtaaacagcgggacggggcttcacctatattatgtgttgaaagagccagtgcctatgtatccgcacaaccagaaatgcttgaaggagctgaaatattcccttactcggcagatttggaaccgatatacctccacgataaaagaaccgcaaatgcagggcattttgcagggctttcgggtggtcggctccggctcgaaactgggacgggagtaccctgtgagggcgttccggcttggcgggccggtggaactggcgcagctgctcgattatattccggacagcaacggggagaggcagcggcttgaggggcttatgagaaagagccgcctgtcgctggatgaagcaaaggagaagtacccagattggtatgaacggaggatcatcaagaaggaacggcggggtcgttggacggtcaagcgtgacctttacgattggtggctgcaccggattgctgacgaaattcgggtaggccatcgtttttatggcattatgacgctggcgatttatgcgaaaaaatgtgggattgacgaagacgagctgcgccgggacgcttttgcgctgctccagccctatgatgatatgagcgtggaggacataaaccgcttcacgaaagatgatgtggtgtgtgccctggagatgttcaatgaggactatgtgacatttcccagggacgatatagcgaagctctctggtcttactatgcctgtcaataagcggaattggcgtaagcaggaagagcatattcaagtgatgaacacaatgaaagcattaaaaaaacagttaggagagattgtcaatgagggtcgacctaaaggcagcggaacagctcaggtacgggtttatgagtggcggcagcagcacccggaaggccgtaaggccgactgccaccgagaaactggccttgatccgaaaactatccgcaaatggtgggattgtccaccaccagcggtgcgctttgaagatgggcatataacggtgcgggtgtccccttcgcaggagttgagcgattggctcctggacgcactgcacaatgagggtcaggaataaggcccagaaaggcccttgttacgctttagaagtcgttttcagccctccgagggtaaatataccggctccctcgctactgcgcccgtaaagccgcataaatcaaggcttttttgccccctaaatgcgtacatactgggatagaactttagagcgtcgaggacagggagattgtattgacattataaacaaaaagctatacaatgaatatgataaaacgggttataataaaagcggaaggagttgctattatggcgaatacaagtatcaatatccgtatggatgcagatttgaagcggcagtttgaggcgttctgtgctgatatgggaatgacgatgacaacggcgttcaatgtttttgcgcgtaaggctgtgagggagtatagaataccctttgaaatcagcggcgatgtgccgaacgcggaaaccgtcgaagcaatcaaggaagtaaagagaatgaaggctaatccgagcctcggcaagacctattccaatgtcgatcagatgatggaggagctacttgccgatgtataacataagaccaaccacaaagtttcagaaggatttgaagcgtgtgaaaaagcgcggctttgatatttctttgctgaccgatattattaaaaagctggctgcgggggagccgttgccggaaaagaacagggatcaccagctttccggggactatgcggggtgtcgtgagtgccacattacgccggattggttgctgatctacgaagtggacggggacgagctgattttatatctcacccggacgggatcgcatagcgatttattttaggggaaggaggaaaggtctatgagctgggataaagagaggatcgcgcagctgcggctccccgatccggcggacgatgatccgcaccctcggctgcttctggaagggtacggcatacatgctgggcaggaatttaccgccttgtttcccgatggctggcacgagattacccttgaagtagcctgg

SEQ ID NO: 7 - DNA, 1515 bp, Intestinicoccus colisanans; identical to SEQ ID NO: 2
  source 1..1515: mol_type = genomic DNA

SEQ ID NO: 8 - DNA, 1515 bp, Intestinicoccus colisanans
  source 1..1515: mol_type = genomic DNA
tttagagagtttgatcctggctcaggacgaacgctggcggcgtgcctaacacatgcaagtcgaacggagttgaaaggagcttgcttttttcaactcagtggcggacgggtgagtaacgcgtgagtaacctgcctttcagagggggataacgttctgaaaagaacgctaataccgcataagattgtagcttcgcatggagcagcaatcaaaggagcaatccgctgaaagatggactcgcgtccgattagatagttggcggggtaacggcccaccaagtcgacgatcggtagccggactgagaggttgatcggccacattgggactgagacacggcccagactcctacgggaggcagcagtgagggatattgggcaatgggggaaaccctgacccagcaacgccgcgtgagggatgacggttttcggattgtaaacctctgtcctctgtgaagatagtgacggtagcagaggaggaagctccggctaactacgtgccagcagccgcggtaatacgtagggagcaagcgttgtccggatttactgggtgtaaagggtgcgtaggcggattggcaagtcagaagtgaaatccatgggcttaacccatgaactgcttttgaaactgttagtcttgagtgaagtagaggtaggcggaattcccggtgtagcggtgaaatgcgtagagatcgggaggaacaccagtggcgaaggcggcctactgggctttaactgacgctgaggcacgaaagtgtgggtagcaaacaggattagataccctggtagtccacactgtaaacgatgattactaggtgtggggggtctaaccccctccgtgccggagttaacacaataagtaatccacctggggagtacgaccgcaaggttgaaactcaaaggaattgacgggggcccgcacaagcagtggagtatgtggtttaattcgacgcaacgcgaagaaccttaccaggtcttgacatccaactaacgaagcagagatgcattaggtgcccttcggggaaagttgagacaggtggtgcatggttgtcgtcagctcgtgtcgtgagatgttgggttaagtcccgcaacgagcgcaacccttgtgattagttgctacgcaagagcactctaatcagactgccgttgacaaaacggaggaaggtggggacgacgtcaaatcatcatgccctttatgacctgggctacacacgtactacaatggtcgttaacagagggaagcaataccgcgaggtggagcaaaaccctaaaaacggtctcagttcagattgtaggctgcaactcgcctacatgaagttggaattgctagtaatcgcggatcagcatgccgcggtgaatacgttcccgggccttgtacacaccgcccgtcacaccatgggagccggtaatacccgaagtcagtagtttaaccgtaaggagaacgctgccgaaggtaggattggcgactggggtgaagtcgtaacaaggtagccgtatcggaaggtgcggctggatcacctccttt

SEQ ID NO: 9 - DNA, 1074 bp, Intestinicoccus colisanans
  source 1..1074: mol_type = genomic DNA
caactcagtggcggacgggtgagtaacgcgtgagtaacctgcctttcagagggggataacgttctgaaaagaacgctaataccgcataagattgtagcttcgcatggagcagcaatcaaaggagcaatccgctgaaagatggactcgcgtccgattagatagttggcggggtaacggcccaccaagtcgacgatcggtagccggactgagaggttgatcggccacattgggactgagacacggcccagactcctacgggaggcagcagtgagggatattgggcaatgggggaaaccctgacccagcaacgccgcgtgagggatgacggttttcggattgtaaacctctgtcctctgtgaagatagtgacggtagcagaggaggaagctccggctaactacgtgccagcagccgcggtaatacgtagggagcaagcgttgtccggatttactgggtgtaaagggtgcgtaggcggattggcaagtcagaagtgaaatccatgggcttaacccatgaactgcttttgaaactgttagtcttgagtgaagtagaggtaggcggaattcccggtgtagcggtgaaatgcgtagagatcgggaggaacaccagtggcgaaggcggcctactgggctttaactgacgctgaggcacgaaagtgtgggtagcaaacaggattagataccctggtagtccacactgtaaacgatgattactaggtgtggggggtctaaccccctccgtgccggagttaacacaataagtaatccacctggggagtacgaccgcaaggttgaaactcaaaggaattgacgggggcccgcacaagcagtggagtatgtggtttaattcgacgcaacgcgaagaaccttaccaggtcttgacatccaactaacgaagcagagatgcattaggtgcccttcggggaaagttgagacaggtggtgcatggttgtcgtcagctcgtgtcgtgagatgttgggttaagtcccgcaacgagcgcaacccttgtgattagttgctacgcaagagcactctaatcagactgccgttgacaaaacggaggaaggtggggacga

SEQ ID NO: 10 - DNA, 488 bp, Intestinicoccus colisanans
  source 1..488: mol_type = genomic DNA
gtggtgcatggttgtcgtcagctcgtgtcgtgagatgttgggttaagtcccgcaacgagcgcaacccttgtgattagttgctacgcaagagcactctaatcagactgccgttgacaaaacggaggaaggtggggacgacgtcaaatcatcatgccctttatgacctgggctacacacgtactacaatggtcgttaacagagggaagcaataccgcgaggtggagcaaaaccctaaaaacggtctcagttcagattgtaggctgcaactcgcctacatgaagttggaattgctagtaatcgcggatcagcatgccgcggtgaatacgttcccgggccttgtacacaccgcccgtcacaccatgggagccggtaatacccgaagtcagtagtttaaccgtaaggagaacgctgccgaaggtaggattggcgactggggtgaagtcgtaacaaggtagccgtatcggaaggtgcggctggatcacctcctt

SEQ ID NO: 11 - DNA, 479708 bp, Intestinicoccus colisanans
  source 1..479708: mol_type = genomic DNA
ccggacggtctccctccaagccaagttccgcttcgatttccctgtggttcttccctgattctaacatcttttctatggtcggtagtagaacctgcatattggtgtatcttcgtttgctcataatgaatcccccctgatgtacttattatcctacatcaggggggattttgtctattgtcctgttttactggttctgttcagaatcgaccggggcatttccccaatgtcgaaaacaagcacaaaataaaaacctttgtgcgtatggcttgctacattgtcatcattataacagaatttacggcaaatttccagaattgcggcataaatagtaggattttttagaagaagtcacggaaatcaacgataaattagcacacaactacgatttttgatataattcaaaatattccgttccaaatgtatcgaaagggactcctttttcctgtgcgattttgcacgaaacagaaataaacacgcggtaaataatgacaaaaaacaggaagaaaattcattcctttttgctgcattttgctgtaaaatgggttcatcaaccgaaggaaaagaatttggggccttcggggaggaaaggacggatacgcaaaaatgaaaaggaagggtggggcacgcaagtatttgcagcaaaacttcgatctatatctgctgctgcttccggcgctcatttacgttttcatctttcatctgctgccgatggttggcattctcatcgcattcaaagactacaacatgtttcaggtaccgggtgatccgttccgttccattttggaaagcccgtgggccggcttcaagtattttgagcaggtgttcaaaaagtctgagttccagcaggcttttgcgaatacactcatcatcagcctgtataagattatcttcacgttcccgctgccgattatcttcgccgtgttcttaaacgaagtgcgcagcacgaaattccaaaagggcttgcagctcatcgtttatttgccgcacttcctttcctgggtcgtcatctacggcattttcgtttcgttcctcggttctacaggcgtcatcaactctgttatcacatcacttgggttcgagccggtcagctttctgatggatagcggtaagttccgcggcatcctcgtcattgcggacgcgtggaaggagatcggctggagctccatcatttacttcgctgccattgcaggccttgatcaggagtgttttgaagcggcggacgtggacggcgcgacgcgcatacagaagatctggtacattacgctgccgagcctgctgccgaccatcgttttgatgctcatcatccgcgtcggcaacatcatgaacgccggctttgatcagatcttcgtgttctacaacccgaccgtatacgatgtggcggacattatcggcacatacgtttaccgtatgggtctcggcaagttagagttcagcaccggcaccgccgtgggcctcttcaactccgtgatttccatgatcctcgttcactcttcaaactttattgccagaaaagcaacaggaaaggggatttggtaacgccatggcaaaaacaactaaaaagaaaaacaaaatctctgtgtttgatgttgtcaacctcatcgctatgatccttgtcggtcttatcatgctgatgccaatcttaaaccttgcggcaaaagcattcagcagcgaaggcaacgtcattgcgggcaaggtgctcttttggccgcttgggctccagaccggtaccataaagtacgtcttaaccacgccggagttcggcacatcgttccttgtcaccgtgacggtcacgattaccggcaccatcggcgcaatgctgcttaccgttatggcggcctacccactctcgaagccgcatcttatcggccgcaagttcttcctgtacattttcgtttttactatgctgttcagcgcaggcatggtgccaaactacatcttgttccgcacgctgcacctgacgaacaccattttcgcactcattttctccggcatgttctcatcgtttaatctgttcctcatcaaaaactattttgaaacgctgccggaagtcattgaagaggccgcccgcattgacggtgcatcgaatatgcgcattttcttcagtgtggtactgcccatgtccacaccggtgcttgccaccgttacgctgtactacgccgttgcttactggagcaactattttgccggcgttatgtacatcacggacgcaaacttaaagcctctgcagcagtacatgttcgaccttgtcacgcaggcaacaagcttgcaggattcctccggcaacttcggcgacgtgaaccaggcgatgaacgtttccggcgagaatatccgcgccgcgaccatcgtcgtttccaccattccgattctctgcgtatacccgttcttacagaagtatttcgtaaagggcatcacaatcggttccgttaagggctaacattaaatccgttatcaagcaataggggactattgcatgaataaaattcattcagcaaaggagttacaacatgaagaaagtattgagcgcactgctcgcagctgctatgattctctctctcgcagcttgcagcggcggcacgaccacatcctcatcgtcttcaagcaccgcttcctcggacagcagcaccgaaagcagcacggtttccagcgaatccgaagccaccgaggacgacccgatcctcacaggcgaaaagccggagctgaagatcctcagcatgtatcaggcttataactatgaggagcagccgacatggaaaatcgacgaagaactcacgggctacaagaccaagtggtatgctctgccggcggataacgccgaccagaagcttctgcttgagatctccagcggcgcagactacgacatcctgctcagagtttctccaagccagtacgcacagctctctaagcagaacgcattgatcgacctttccggcatgctggacaagtacggatccaacatcacgaatgccatcagtgagcttgcatggcagtccgttacgaacgatcagggcgttgtaaacggtattccgcatgaaaacatgctggcttccaaggaagagccgtacggtatgctcaccggcggcatcggcgtgcgcagcgatatgctggaagagctcggcatggagttgccgacgaacatcgatgacttcaccgcgttccttgaggctgcaaaagagaagtacggcttcgcaccgctgacctccaacaagtccagcacattcattcaggtcctgctctccggcttcggcatgggcgaggcggaatggtacgacatcgacggcacctacacacacagaatcaagcacccgcagatcaccgcgtatcttgagtacatgcagaagctctataaagaaggtctcatggataacgatataccgatcaacacagcagataacgccaaagaaaaatttgcaagcgccaacgctgttgcctgcgcaccgctgatgttctgggacattccggctatggtcaacgcactggcaacgaataacccggattgcaagattgagttcgtgacggaccttgcggcagatgcgaattccaagcccacacactacatcatgaagggcgcaaacttcgtttcctgcatctcgcagagctccaagaaccccgagcatgccatcaactggctcaacatcctctccgaaccggataactatcgcagaacctacatcggcgaagaaggcgtttcctacgaagtgattgacggcaactacaccccaatcttcaccggcgacgatgcaacgaacttcaatgcgtatacgaattccgataagctctccggcatcaacaacccgaccgtttctttcaaaatgtggcaggccagagcgagaaagactccggaaatggcagaagcttatgaagcgatgaacgctcgcgtagacgagtacgagccgctcatctccatcgagctttacggcaagacctccccgaaggttcaggagtatgtcacggcgctgaatcaggcattcggcgattccttcctgaaagcgatcgttgagggcaccgacccggataccgccattgcagcgatgcaggccgactgggacgcaaacggtggccttgaagtcgaagctgctatgcaggaattctacgacgcaaataagtcctactccgaataattttacagcctctccttaaaaatgtgatatgaagaaagcgatcccgccttctgcccgcacggcggagggcgggatcctctccataaagaaaggaatgtatatgaacacactgcatattcccgaaaagaaaataccggtcatcgatacctttgacaccgtcgtgctcggcggcggcacggcaggcgcttttgcgggcatcgctgcagctcgccgcggcagccgtacgctcatcatcgagcagtttggcgcgctcggcggctcagctaccaccggtcttgtgctgccgctgatgttactgcacatcaaaaattatgatggccactgcccgctgagtgcagagcttgtagagcgcctgcgcaccgtcggcgggacagaggaagacgccaactcttttgaccccgttatggtgcaaatcacgttagaagacatggcggcagacagtaactgcgatattctgtattacaccacgctcgtggatgccgtgctcgaagatcgcacaataacacacgtgattgtcaacaataagaacggccttgcggcatacaaagcgaagtgcttcattgactgcaccggtgacgctgacctcatcaagctcgtcggtgcgtcgtatcagtccggcaaccacaaccgcgtgaatcagccggtctccctgcgctttgacatggcgggtattgactttgaacgtttccacgcgtacatgcgcagcctcggcaacgaccaatataaatactttgctatgaacacgcccggtatgaaagacattatccgcaaggcgtatgaaaacggcgtgctgaccgagcaggacgcgtgctattttcaggcattcggtattcccggccgcccggacggcatgaacttcaactgcccggagctgacgacgaaagaaaacgttgtggatgcggaatttatgacgcaaaagcagcttgagggcaaaaaagccattatgcgcctgcgcaaattcctacgcgactatattccgggctttgagaatgcgtatatcacaagcatcgcgcagctcgtcggctttcgtgaatcccgccgcatcgaagcagaatacatgctgacgattgaagatgtgctgacgtacagaaaattcccggacggcattgctgcgagccattatcctatcgatgtgcacggcgtggacgatgtttcgctgggactcaaatatcagcatgacgtaccggtcgatgaacagtattgggaagtcccgttccgggtgatgatcccgaaaacgctcgataacgtgcttacagccgggcgctgcgcgggtatggatttccgtgcgcagtccgccgcacgcatccaacccacctgccgctccatgggtgaggccgcgggcatcgccgccgcaatggccgtaaagaacgaagccgtgcggtttaacgagatcgacggcacagccgtgcgccgcgagatccgcctgccggataaattctaaaaatcaaaactcaaaatttttcctccaaatcagcaaaagacgtgtaccgggaaagcctggcacacgttttttgttttgtacaacttatggggagcgcggtattgaaattgcgttgtttttttgctataatagagtgaattatagtctaaagcggtttatcggcggaaaatccgtgtttgataaaccgaaatgcccgaacaaaaccggcttttgccggaagctgaatattaaagtgagggaaaaacatgcggatcataatcgacgcattcggcggcgacaacgccccggacgaaattataaaaggctgccgtctggcggcagatgagctccatgtgcagatcgttttaaccggcgacgaaaagaagatcagagcagcggcggaaaagctgaatgttaacgtttccgattttgagatcatcgactgcccggatgtcatcacgatggaggatgagcccacagcgatcacgcgcgccaaaaagcaaagctcaatggcggttggcctgcgcgctttggcagagggcaagggcgatgcgtttgcgtccgccggcaacagcggcgcactcgtcgttggcgccacattgctcgtcaagcgcatcaaaggcgtcaagcgcgtggcatttgcaccgctcatgccgaaatccgagggctttttcatgctggcagacggcggcgcaaacaacgaatgccgccccgaaatgttggagcagttcggcatgatgggctctgtgtatatgcagaaggtcatgggtgttcaaaagccgcgcatcggccttgcaaatgtcggcacggagccgcacaagggcggcgaactgcagcacgcggcgtttgcactgctgagcgaaaacaaagacgtccatttcatcggcaacattgaagccagagacattccgtttgatgcggcagatgttgtggtgtgcgacggttttacgggcaatatccttcttaagatgtatgaaggcgttgccatggcgctgatgaataaattcaaggccgttttcaaaaagagcctgaaaaataagcttgcggcggcaatggttttaaacgacatgaaagccatgaaaaaagagcttgattataacgaatacggcggtgcgccgatcctcgggtgctcgaagccggtctttaaggtacatggcagcgccaaggcttctacgctgaaaaacgccattgcgcttacggtgaagtacgccgagtccggcattataagtgagatcaccgcagccctacaaaacgagaaaacggaaaacacgaacgaataacaagacagcaaaggtataactatgagatcattggatgaatttgaaaaaaagatcggatatagatttaagaaccgcaatctgctcatcacagcgctgacgcactcctcctacgcaaacgagagccgcggcggcgaccagagctatgagcgactggaattcctcggcgattccattttggggtttgtcacggcggaatacctgtgcaaagcgttcccggatattcccgaaggcaagctgacaaagaagcgtgcggcgcttgtatgcgaaaaatcgctctgcggttttacacgcagcttcggcgcaggcgagctgctgcgtctcagccacggcgagcagcacagcggcggcagagaacgcccaagcatcttagcggacgtgttcgaatccattacggcggcgatctatctcgactccggcagcttggaggaggccaagcgctttgtactgcactacattgaaccggcggcgcagtctgcaggcgaacgcccgtttaaagaccacaagacgatgctgcaggagatcattcagcagaaccccggtgaacggctcgaatacgtcctcaccggcgaacatggccccgaccatgacaagcacttcaccgtagaggtgcacctcaacagcaatgtcatcggcaagggcggcggacgcagcaagaaggaagccgaacagcaggcggcacgcgaagcactggagctgatgggctattaagcacgcgaatatctcaatttttattccgcacaacggctgcccgcagcaatgcagcttctgtaatcagaaccgcattacaggtgaaaatcatcagccgcagcctgaagaagtggcggcgctgctgcaaagcgcagcaaagcaaatgggggagcgcgtgcagaacgccgagatcgcatttttcggcggcagcttcacggcaatcgaccccgattaccgtttggcgcttttaaaaatagcgcacgcagcatgcgaaacatacggctttgccggtatccgctgctctacgcggccggatgccattgatgatgaacgtctgaccgtattaaagcaatacggcgtaacggcaatcgagctcggtgcgcagtcgatggatggcgaagtgttgctgctcaatcgtcgggggcataccgcaaaggatgtggaaaacactgcgcggttaattcgcgcatacggctttgagctcggcttgcagatgatgaccgggctgcccggcgacagtgacgcaaaggcgatgaagactgtcgaaaggctgttggctctaaagccgaacaccatgcgcatttaccctacgatcgtcttagaaaacacaccactgtgcgatttgtaccgcgcaggaaaatacacaccgcagaccttagaggatgccgtttcactctgtgcaaagctcatcccgatgattgagcagcgcggcgtaaagctcatccgtgtggggctgcacgccagcgaagaactggaaaaccgtgtcgcgggaccgtttcaccccgcttttatggagctgtgccgcagcgcgatcttccgagaaaacgtccttaaagcgcttcaagcccgaaacgattcggaagttacgatcgatgttgacccgcgcatgctttccgttgcgctcggacagaaaaaagaaaatttgcagcatttctctaagcacggctacaccgtgcacatccgcccggatgcttcgctttccggcggcacatacaggctacgataggcaggtaaacagatgcatttaaaatctctggagctgcagggcttcaaaacctttcccgataaaacgactttaaaatttgaaaacggcatcacggcggtcgtcggtccaaacggcagcggcaagagcaacatcagcgatgccatgcgttgggtactcggcgagcagtctacccgcgcactgcgctgctccaaaatggaggacatcattttcagcggcacgccgcagcgcaaagcgcagggcttttgcgaagtgaccgtcaccatggataacaccgaccgcgagttgaattacgacggcgacaccgtttccgttacgcgtcgtttttaccgctccggcgaaagtgaataccgcattaacaaaacgctcgtacgtctgcgcgacgtgcatgagctgttcatggataccggcctcggccgcgacggctattccatcatcgggcagggcaagatcgatagcatcgtctccgcaaaaagcgaagaccgccgcgagatttttgaagaagccgccggcatttcgcgctttcgctaccgcaaagaggaagccgaacgccgcttggaaaaagccgaagaaaacctcattcgcctgcacgatattttaaacgaactcgaagaacgcgtgggccctttacgcgagcaggcggagaaagccgaaaagtttattgcactcgacagcgagaaaaaggaactggagatcggtttgtggcttgaaacgctggagcgctccggcaagatcgtgcgcgaggtggaggaaaagattgcctccgcgcagaacagctacgaggaagttgaaagtgagctcaatgtgctttccgcgcaaatcgagcagaatttcacggaaacgaacggctgcaccgcacagatggaagaagcacgtttgaaggcctccgaagccgatgaactcgccacccgtaaagagggagaagtttcggtgcttgaaaatgatattctgcacgagcagcagaccatccgcagattaaacggcgagattgaaagcgccgcgctgaccggacaaacgcttgaagcggatattcaagaaaaagaacaggcggtaaaagcaaaggaagcggaagctgcgcagaaccatgccgatttcattgcctttaccgcacaactcgaggagctgcgtgccggcacggacagcaccacgcgtgagatcgacgccgtttcggctgagcttgtggcactgaacgccgcactttccgaaatgcgcgtgcagcagtcctcggcggaatcctccatgcaggagattcgcgcccgcgctgaaacagtggatgctgcgatcaccgaaagcgaagaacgccttgcagcgcttcacacggagtgcgaggagcttgacgccatgctgcacgatacggcggagtacattcaaaacgctgaaaacactgtgcaggggcatgaaatgcgtgtgcagcagcgcagaaaacgcgccgaagccgtgaaagccgaagccgaccgccagatgctcgacgccaaagaaaaagagcgccgcgccggactgttggaagaccttgaacgcaatcttgaaggcttcacgcagagcgttaaaaccgtcatgcgcgagagcacgcgcggcaatctgcgtggtatccacggacctgttacacggcttttaaaagtcccgcgcgaatacgccgtggcgctggagaccgcgctcggcgccgccatgcagaacgtcgtcgttgattccgaagatgcggcgaaagcggctattcgcttattgaaacagcgcgattccggccgtgcgacattcctgccgctgaccacggtgcgcggtacggttatcgatgcgcgcgatgtgcagaatatgcccggctttgtgggcgtggcttcaacactctgccactgtgatgagcagtacgccggcatccgcgattctctgctcggccgcactattgttacagaagaccttgaccgcgcggcggagattgcacggcgtattcggttccgctaccgtgtcgtcagcttggacgggcagattgtcaatgcgggcggttcgttcaccggcggttccgcggcgcgaaactccggccttttgagccgctcggcggagattgcacgcattcgcgcagacgcacaaatgctggcgcaggctgcaaatgaaacactggagcgccacaagactacacagcaggaagtgctgcaggccatggtggagcttgaaaacgccaaggctgtgctggcgcagcacagggaagatgagatccgcttcaaaacggaagcggcccgtgccgcacgcgacgtggagacggaaaccgcgaaccttgcttctctgcgcgacgaaaaagaaagtgccgcaaagcgtctgagcggttttgtgcagaccgcagacagcgcccagcagaaaacagaagaaacagaagacaaaattcaggcagccagaagcaaaatggaatccatgatcggcgaccgcgaggacgcaatgcatcgttgtgatgagaccttgcagcatttgcaggaaatccgttttgcggggctcgccatcgaaaaagataaagaatcgcttgaaaatgctgtgcaaacgctgaaagcacagcagtccgaacgcgctgcacgtatagaaagtttaaatcaagaacttgcggaaagcttcgagaagatcaaagcgcgcgaagcggatattgaaaaccgaaaaatcgaatctgctaatctgcgtgagaccgcaaaggaaaaacggcaaacggtcagcgtcatcgccgcaaagcgcacggcactcgagcaacagacgagcgagttgcgccaaaaagaacgcgaagcttcctcgcgccgcgagacgattggccttgaacttgcccgtctgcgcgaacgccgtgaaaaccagagcggtgaatacgacgctatcctcaaaaagctgtgggaagaatacgagctcacccgccgcgaagccgaggaaatgaacatcacgattgaagatgtgcccacggcgcaaaggcggttgtccgaacttaaaaacagcatcaaagcgctcggctccgtcaacgtggcggctgttgtggaatacaaagaggtttcggagcgctacaatttcctcaaaatgcaaacggacgacgtgcagcgctcccgcgccgagctgttaaagctcatcgacaacttgacaaagcagatgcagacgcagtttgcagagcgcttttccgtcatcaatcagaatttcagccggatttttcaggagttattcggcggcggatcggcagagctttgctttacggacagcggcgatgtactgcattccggcatcgatatccgcgtgcacccgccgggcaagatcgtctcgcacatcgagctgctttccggcggcgaaaaggcgcttgtggcaatttcgctttactttgcaatcatgcgcgtaaatccaccgtcgttctgtatgctcgacgagatcgaagctgcactggatgacgtaaatgtcgtgcgctttgcaaattacctgcgccgcatgaaccaaaagacacagttcatcgtcatcacgcaccgccgcggcacgatggaagaagctgatatgctctacggcgtgacgatgcaggaccagggcatttcgaaactcttggcactgcacgcacacgaagcgcaggaaaaactgggtataacaacataaattcggaaaagaggtgcctgaatgggcttttttgataagatcaaagcgggactaaaaaaaacaagagacagcatcaccgggcagattagcagcatgctccacgcgttcacaaagatcgatgaggagctgtttgaggagcttgaagagctgcttgtcatggcggacgtcggcatgaacaccgcgaccgaaatctgcgatacgctccgcgcacgcgtgaaagagcgcggcatcacagacccgaacgagattatgacgcttttgcaggaggtcgtcacggagatggtcagcggcgacaacgagttgcatctcgatacgcagccatccgtcatccttgtcatcggcgtgaacggcgtcggcaaaacgacgaccatcggcaagctggcttcccgccttaaaaaagagggcaaatcggtaattttgggcgcggcggatacgttccgcgcggcggccattgagcagcttgaagtctgggcagagcgcgcagacgtgccgatcatcaagcatgcagagggcgcagaccccgccgccgtcgtgtacgatacaatctccgcggcgaaggcacgtcacgccgatgtggtcatctgtgatacggccggacgcctgcacaataagaaaaacctgatggacgagctttccaaaatttcgcgcatcatcgataagggtctgccgggctgcagcaaagaagttttgcttgtgctcgatgccacaacggggcagaacgccgtcaatcaggcgcgtgaattcaaagaagccgcaggactcacgggtatcgtgctcacaaagctcgacggcaccgcaaagggcggcgttgtgttggcaatccaccgggatctcggtttgccggtgaagttcatcggcgtcggcgagcaggtggacgatctgcagccgtttgacgcggaggatttcgcccgcgcgctgttcgagcggagaccggaagcatgaggctcgccgttttttccgatgtacacagcaaccaccatgcgctgaaagcttgcctgaaggaagcggaaaagcaaaaagcggatgggtacattttcctcggcgattatatttcggactgtgcaaacccgcacgagactatgaagctaatataccgcgcaaagcaggaaatgccctgctggttcgtgcgcggcaaccgcgaagaatatgtgctgaaccaccacaacttcggcagcgattgggcaaacggcactacaacaggctcccttctatacacctacgaggggctaacggcggaggatctcgagttcatctccgtattgccgtttatgcagacaattgatccaaacggcaagtgtcccatacgcatttgccacggctcaccggaaaaaacgcgcgacacgctgcgcccgttctcctataagatagaaagctggcttttaaaaatcgacgagcgcgtgcttttaagcggccacacgcatcagccgtgcagcgcgcacacaatgggcaagctgtacgtgaaccccggtgcggtcggcgtgcagtgtacgcaaaccgtcacggcgaaaatggcgctgctcgattccgacggaaacacatggaacgaaacgctgctcgaagtgccgtatgacattgacgccgcagcactggaaatccgcgaaagcggactgctgacccgcgcgggcgtgtgggggcatgcgattttaaaacagctttacaccggcaaaaattattcgcttttctgcgtgcagcgcgcagaagagcttgcagcgggcggccccgtacttttagagcattggcagcaagccgcacgcgatttcggaattttggagggataacgtatgaacatgatcattgcaacgcataatgcgcataaaatagaagaattcggccgcattttggcgccgcttggcatcaccgtgcagacgaccgagctgaccgaggcggaagagaccggcaccacgttccgtgaaaacgcgtatatcaaggcgaaatccgcgtgtgacgaaacgggcctgccgtgcgtcgcggacgattccggcttatcgatcgattatttaaacggcgagccgggcgtgtattccgcacggtatgccgagccgggcaagcgtaaggcaacggtactcaaaaagctcaagggcgtgccggaagaaaagcgcggcgcacactttacaagcgccatctgctgtgtattcccgaacggcgacgtacttgaagctgagggctactgctacgggcgcatcgcagaggaatgccgcggtgaaagcggtttcggttatgaccccattttcatctgcaccgaagaaggctgcgcgggcaagacgttcggcgaagcgacagcagaagaaaaggatgccgtgagccaccgagggaaatccttgcgtattttcgcagaaaaacttgaaaactacttgaaagacaaagagggataaattatgctgaccagtaaacaaagagcgtatctccgctcgctcgccgtaaatgaagacaccattttgatgattggcaagggcggcatcgatggagatgtcgtaaagcaggccgcagacgctatttttaagcgtgaactcatcaagggcaaagtgttggagactgcgccggtctctccgcgtgaagccgcagaagcgctcgcagagcagacggaaagcgaagtcgtgcaggtcatcggttccaaatttgcgctttataaacgcaacgaaaaggatccgaagatcgtcctgccgcgtgcgaaaaaggcataagccatgcgcatcggcatttacggcggcacgttcaatcccatccacacggcgcatgtgcaccttgtgcgggagtttattaagcgtctgtcgcttgaccgcgtgattttgattccgacgggcacgccgccgcacaaagcgacacatcagcttgcaagcggggcagaccgcattgaaatgtgcaggcttgcggcggcagacatcgccgaatgtcccgtcacagtctcggatattgaagtgctgcgcacgggcaaaagctacacggcagacaccatgacggaactgaaagcgcaatatcccgacgatgcgctctttttgctgatgggggaagacatgttctgcaccgtcgaaaagtggtatcacccggagcgcattttcgccgcggcagagatctgcgccgcaccgcgtgacaaggatagcttccaaacgcttgtcacacacggagaagaagtgaaggaaaagttcccgcagctgcgctttaccgtgcagaacatcgagtttttgcctgtctcatcgacgatggtgcgcgaaaaaagtctgcagggcgaagatataagcggtcttgtgcccgcaggcgtcgcggaatacatccaaaaaaagaggctttacacgcatgaataagaaagaaaaacagcaatatatcgatatcatcaagcccatgctcacgcaaaaacgtttcgaacactccttaaatgtttcggaagaagcggtaaagcttgcaaaaaaatacggtgccgataccgaaaaagcggagcttgcagggcttttgcacgatattttgaaggatacacccccggagaaacagttgaaaattctcgcggactttggtataattatgagagacgttgaactttccgctaaaaagttctggcatgccatcagcggcgcggtgtatatcaagcatgttctgcacattgaggacgaggatgtttacaatgccgtgcgataccacaccacgggcagaaaaaacatgacgttactcgaaaaagtcatttttatcgcggatttcatctccaaagaccgcaattaccccggcgtagaggatatgcgcaaggccgcgtataaaagccttgacaaagctattgtggagggcatcgcgttcaccattacggagctcgcaaaagaccgcgcgcccatcgtgccggagaccatagacgcatataatgacgcggtgtgggctttgcggcacggcaactaagcggaaggaagcataaaaatcgcgcagcgcgcagaaaggaatggctaaaagcatggattcattgacgcttgcaaaaaccgcagcgggcattttggatgcgaaaaaagccgatcagatcaatgtgatccgcatttcggacgtttcctcgctcggtgattatttcgttctggcgaacggcaccggcagcacgcatgtgcatgctctggcggacgagctggagtttaagctgaaagagctcggcattgcgccggaccgcgtggagggctatcgctccgattcctgggtcgtgctcgattacgaaacggtggtcgtacacatcttcacctcggaagcgcgcagtttttatgatttggatcgcctgtggctcgacggcgaaaagctcaacatgacgtttgaaccgaattgattttgttattttatatagcgcagagaggtaagtgtaatcaatatgaacaagtacaatcccagtgaaattgaaccgaagtggcaaaagaagtgggaagaagccggtgttttccatgcttccaatacttcggataagccgaaatattatgctctgatcgagttcccgtacccgtccggtcagggtctgcatgttggccacccgcgtccgtacaccgcgcttgacgttgtttccagaaagcgccgcatggagggctacaatgtgctctatccgattggttgggatgcattcggcctaccggcagagaattatgccatcaagaaccacgtgcacccggaagagatcacaaagaagaatattgcgcgctttaagcagcagattcagtctctcggcatctccttcgactggagccgtgagatcagcaccattgatccgaaatactacaagtggacgcagtggattttcctccagctctttaagaacggtttggcctacaaaaaagagatgtccgtcaactggtgcacctcctgcaaatgcgttctggcaaacgaagaggttgtcaacggcgtctgtgagcgctgcggcagtgaagttattcacaaggtcaaatcccagtggatgctgaaaatcaccgcttacgcacagcgcctcatcgacgaccttgatcttgtcgattatccagaccgcgttaagacccagcagaaaaactggattggccgttccgagggcgccgaggtcgatttcaacacgaccgcaggcgataagctgactgtttacacgacccgcccggatacactttacggcgcaacgtacatggtcgtttccccggagcatccgttcattgaaaagtgggcggataagctgcagaatctggatgccgtccgcgcatatcaggcagaggccgcgaaaaagtccgactttgagcgcaccgaggtcgcgaaagataagaccggcgtgcgtttggagggtgttgaggccatcaacccgctgaccggtaccaccattccgatcttcatttccgactacgttctcgtttcctacggtaccggcgccatcatggctgttccggcacacgatacccgtgactgggagttcgcaaagaagttcgacctgccaatcgtcgaagtcgttaagggcggcgatgtacagaaagaagcgttcacggactgcgacaccggcatcatggtcaactccggcattctggacggcatgaccgtcgaagaagcgaaagtccgcatcaaagattaccttgaggagaccggcatcggccaccgtaaggtcaactataagctccgtgactgggtattcgcacgccagcgctactggggcgagccgattccgattgtacactgcgagaagtgcggctatgtgccgatcgatgaaagcgagctgccgctcgttctgccgcaggttgattcctacgagccgaccgataacggcgaatctccgctctccaagatgaccgattgggtcaacaccacgtgcccgaagtgcggcggcaaggccatgcgcgaaacggacaccatgccgcagtgggcaggctcctcctggtacttcctgcgctatatggatccgcacaacgatgaatcttttgcatccaaggaagcactcaactactggcatcaggtagactggtataacggcggcatggagcacaccacgctgcacttgctgtacagccgtttctggcataagttcctctacgatatcggccaggtcccgaccgcagaaccgtatgcaaagcgcacgagccacggcatgattctcggtgaaaacggcgagaagatgagtaagtctcgcggcaacgttgtcaacccggacgacgttgtaaacgagtttggcgctgatacgctccgtctctacgaaatgttcatcggcgactttgagaaggccgcaccgtggagcaacgccggtatcaagggctgccgccgcttcattgagcgttattggaacctgcagtccattctcgtcgacggcgaagcgatccgcccggagatggaaaattctttccacaaagccatcaagaaggtctcttatgacattgagaacctcaagttcaacaccgccattgcatctttgatggcgctcatgaacgttattgcggaaaagggctccatcaataaagcagagctctccgtcttcacgatgctcctcaacccgtttgcaccgcatgtaacagaagaggtttggagcgaaatgaagctcggcgagggcatggtcacggagcagccttggccgaagtacgacgaatcaaagtgcaaagatgacgtcattgaaatcgttgtgcaggtcaacggcaaagttcgcgcaagactgtgcgttgcagccgatatccagaaggatgacgcgattgcacttgcaaaggcggaagaccgcattgcagcggagatcaacggcaagaacgtcgtgaaagagatctacgttccgggcaagctcgtcaatatcgttgtaaaaggataattctttacagagcgctgtgtgtgaattcacagcgctctttttacatttgcgtaaagttaaatagctttgaaaaggctttttactttacaagatcggaggccagtacatgaaacatgcactcgttttattttcttcgccgcataaagacggacacacaaagaagctgcttgaagcttttctcgacggattgaaaggaaaagactggaaagtaaaatcacttgacatttgcaaagtgaatattcatccgtgtatcgcctgcggatattgccaaaaagcagacggctgcgcgtttcgcgacctcgatgaattcgatcgtgacctacgcgcgtgtgatctgcttctcatcgccacgccggtctataacctctcgtttccggcgcagttcaaggcggtcatcgaccgttttcagcggtattttgaagctagatttgcccgcggtatccgcccggcgattgcgacacaccgcgatgccgttttgctgctcaccatggggcggtatgatccgtttgcggtggaggtatgcgagaaaacactgcgccaaagcttttccgttatgaacacaacgctcaaaaaaacgatggttttgccggacacagaccgtgcagattgcgaaaactctgcgattttcgcgaaggcacaggaaattgctattgaaatcgcgcgcgagctgtgatataataacttgaatttgtgtgaataaaggcaggttttcatcaatgtcaggacattccaagtggaataatattaagagaaagaaagaaaagaccgacggcgcaagagcgaagatcttcacaaagatcggccgtgagcttgccgttgccgttaaagaaggcggcagcgcagacccggcagcaaactccaagctgaaggacgtcattgcgaaggctaaggcgaacaatgtgccgaacgacaacattgagcgcatcattaagaaagccgcaggcgagggcaactccaacgcatatgaaagcatcacctacgaaggctacggccccgcaggcgttgccgtcatcgtggaatgcctcaccgataaccgcaaccgtaccgcaggcgatgtccgtcattactttgataagttcggcggcaacctcggcaccaccggctgcgtttccttcatgttcaacgaaaagggcgttatcgtgctggagcgtgagggccttgacgaagataccgtcatgagtgatgcactggaggccggtgcttccgattttcaggcagacgaagacgtatttgagatctacactgagccgtccgatttcagcggcgttcgcgatgatctggaagctaagggctattcctttgtttccgcagaagtggaaatggtcccggatacctacacggatctcaccgatcccgatcagattctcaagatgcagaagctgattgatgcactcgaggataacgacgatgtccagcaagtctggcacaactggaacgagcccgaggaagaagacgaagattgatgctgaaaacctctccgggcttaccggggaggttttttacagcctgtttttacttgcgccacgtataaaacgcaacacacggcgcacataagaaaggaaggcatagataagatgaatgagttaagacatctcgtagacccgctggatctttcctttgaggagaccctgcgtctgctggaccttgcggacagcattgcaaacgaccgcaccgcattcgcccacaagtgtgaaggtaagatccttgccacgctcttttacgagccgagtacccgcacgcgtctgagttttgaatcggccatgatgcgccttggcggcaaggtattgggctttgcaagtgcacagaacagctctgcttccaagggtgaaagcgttgccgatacggtacgcatggtatcctgctattcggatatcatcgccatgcgccacaacaaagagggtgcgccgcgcgtagcagcacagtatgcccgcgtgccggtcatcaacgccggtgacggtggccaccagcacccgacgcagacgctcagcgacctgctcaccatccgccgcgaaaagggcagattgaataacctgacgattggtctgtgcggcgacttgaaatttggccgcaccgtgcactcgctcatcaagtcgcttgtgcgctgggagggcatccgcttcgtgttcatctccccggaagagctgcatgtgccgagctatatcattgatgaagtcgtaaagccctccggctgcgaatataaagaagtccgtaccatggacgaggttctgccggagcttgacgtactctacatgacccgcgtacagcgcgagcgcttcttcaacgaagaagattacatccgcttaaaagacagcttcatcctcgatgcagagaagatgaagcttgcgccgaaggatctcattgtgctgcatccgctgccgcgtatcaacgagatcgcggtcgaagtggacgatgacccgcgcgcaaagtactttgtgcaggcacaaaacagcgtatatgtccgcatggcgctcattttaatgcttctgaacattgaaccgggactttttgaggaggaaaccgtatgctgaacatcgacagtatccaaaacggcattgtgatcgaccatattcaggcaggaaagggtatgcgcatctacgagcttttggagctcgataagctcgattgctgcgtggcacttatcaaaaatgcccgcagcagcaagatgggcagaaaagatatcatcaagattgaaggcgacctcgccatcaacttcgatgtgctcggctttatcgataacaacatcaccgtatgcaccattaaaaacggtgagcttgtgaagaaagagaacatcgtgctgccacgtcgcatcaaaaatgttgtaaagtgcaagaacccgcgctgcatcacaagcacggaggaaaacctcgaccagatcttcgtgctgtgcgatgaaaaagcgcaccgctatcgttgcctgtactgtgaacaagcgtataagagccatgagtaaagcacagcgtaacggtgcaggccgtcgcgatccggagaaactgaagcgccaaaagcgccgtgaccgtctgtttctggcgttcctgacctttttgaattttctccttgcattaatcgtacgcatcgcagaccgcaagagcgtcatcaaagcggtaaagcaggacgacaagcttgcggtgctgcttgaagaaaaaaccacaaaatccctttgaaataccttgactttagggtcagtgtatgttaatatgatagagccgcttactgtgggctgaaaagtgacgaaagtccgcctacgagtagcgagattacagaaaaggcaggcagaaaaaatgtttgcagttattgaaaccggcggtaagcagtacaaggtacagtacggcgacgtgatctacgttgagaagctcgctgccaatgaagacgagacagttacgttcccggtcgttgcaatttgcagcgaagacggaacaaaaatcggcaccccgtatgttgagggcgcttccgttacaggcaaggtcctgaagaacggcaaggctaagaaggttacgatcctcacttacaagccgaagaagggcgaaaagcgcaagatgggccacagacagccctacacgaagattcagattgagtccgttcagggctaatttgatcgtatgattcgtgcggattttttcgcaaatgcagacggagcacttctcggtttttccgtgcttggccattccggtctggcacaggaaggagaagacattctctgtgctgcggtttcttctgcggcgtatatgacggcgaacaccgtgctggagattttacacatcacaccgatttctctccgagcagaggacggcgagatgctgtttagggtttccgataccgatgcacggacatgccgtagcctgtttgagggatttaagctgcatcttctcggtttagaggagcagtaccccgaaaacttacaggtacgctacgcagaagtctgacaataaaacgaaaggaaggcaacaaaatgcttaagatcaatatccagttgtttgctcataaaaaaggtatgggctccacgaagaacggccgtgattccgaatccaaaagactcggtgtcaagcgtgcagatggtcagcacgtcctcgcaggcaacattcttgttaagcagcgcggcacgcacatccatccgggcgagaacgtaggcagaggctctgatgactctctgttcgcgctcattgacggtcaggttcgtttcgagcgtatgggccgtgaccgcaagaaggtcagcgtttactcgatcgagcagtaattttgacccttggggggaataccggtttcgtatccccgaatatacgatgaaacgggcttcttcgggtaaagcggagaagcccattttattttgtacagagccgtccgcggcgctgaaaggatgatgaattatgtttatcgatatagctaagatcaaggtaaaagccggtgacggcggcgacggcgccgtggcttttcaccgtgaaaaatacgtggcttccggcggcccggacggcggcgacggcggtcgcggcggcgacatcgtgttccgcgtggacgataacctctccacgctggcggatttccgctacaagcgcaagtacaccgcagagcgtggcgaaaacggtcgcggcaagcgctgcttcggcaaaagcgcacagccgctcgtcattaccgtgccgcgcggcacactgatccgcaatgcggaaaccggccgcatcatggcggacatgtccacagacgaagacgtcgttatcgcgaagggcggccgcggtggctggggcaacacgcattttgcgtcgcctacgcgccaaactccgcgctttgcaaagcccggcacacccggtgaagcattcgagcttcagcttgaactcaagctgctcgctgatgtgggccttgtaggcttcccaaacgtaggtaaatctacgcttgtttccgttgtaagtgaagcaaagccaaacattgcaaactaccactttacgaccatcaccccggtgctcggcgtggtgcatatgccgaacgcgccatcgtttgtcatggcagatattcccggccttatcgagggcgcatggcagggtgtaggcctcggtcatcagtttctgcgccatgtagagcgttgccgcatgctcattcacattgtcgatgtttccggcagcgagggcagagacccgaaggaggacttccgcatcatcaacgaagaactgcgcaaattcaaccccgaccttgcgaaccgtcccatgctggtcgccggcaacaaatgcgacctgacgaccgacgagcaggtagaggatttccgcaaatttgtcgaggagcaaggctatgaattctttccaatcatggcggcaatccgctatgatgttgacccgcttttgaataagaccgcagaaatgctttccacgctgccgccggtcgcgcatttcgagccggaaccggagccggtaaagcctgtcgaagaattcagcagcaaggcaaaggtcgatatccgcgtggaggacaacgtgtattttgtcgaggccgattggctcttaaagctcatctccgccgtcgatttcgatgattacgagtcgctccagtacttccagcgtgtgctcattcacaccggcgttatcgatgcgctgcgtgaggcgggcatccaggaaggcgacacggtcagcatgtatgaccttgaatttgattttgtaaactaagagggtggctatttggaaaagttctatcaaacggaatcggatccgaagcagttaagccccttaacgctcgcttatgtgggtgacggcgtgtacgagcttttcgtgcgcgaatatatcgtctccaaaggcaactgccctgtgaaaaagctgcacagccgcgccgtttcgttcgtgcgttgcgagtttcaggcgaaggtgcttagtgaagtgctgatgccgcttttcacggaagaggaaaaagaagtctgcctgcgcggacgcaatgcgcacgtttcgcacgtgccgaaaaactcaagcgttgcggattaccacgcagccacagcatttgaatgcgttttcggttatctttaccttaaaggcgagctggagcgcctgcgtcttttcttcgataagatccttgaattcgcagaaacggaggaaaccgcacatgcgtaaaaataaagttgcaaaaaacgtgaaggaattcctgcttgacctgattttcatgacggcgggttccgttatttacgcggtcggcctgaacggctttaccgcgccgaacaacatcgcgccgggcggcgtgagcggtatcgccatcgtgctgaattatctgttcggcacgcccgtcggcaccgtaattttgcttattaacgtgccgatcatcatttgggcgatcattgagatcggctataagctcgtcaccaaaacgatgttggcggtcgtgttaaacgctgcctgcatcgacatcgtggcgctgttcatgccggtctaccacggtgacccactcatcatcatgctcatcggcggcgtgtgtgagggcgttggtctttcactcgtctttatgcgcggtgccacgaccggcggcacggacatgatcgcgcgtctgctcaatcatcgcctgcgccatctttccatgggcaagctgatgcttgccgtagacggctgcgtcgtgctgttttccgccatcgtatataagagcattgaaagcgccgtgtacgcgtgcatcgtcatttttgtatcgacaaaaatcatcgatacaattctgtacggcacagatgcgggcaacggcaaaatgttcttcattatgtcccataaaaacgatgtcattgccgaccgcatcatcaaggagatggaccgcggcctgacgtttctcaagtcccgcagcggctatttgaagcaggacggcgaggtgctcttctgcgccgtgcgtcgcttcgaggtgttccgtatcagcgagatcatccgcgaggaagaccccgatgcgttcgtcatcgtcggcgatgccggtgaaatcgccggtgagggcttcaaacccgtgcgctccgacgaccgcacgctcggcgagattatcaaagctattcgcaagacgggcgataagccggtcagcgagccgaaagaataaatccgcatagaaaaagcagacaagcgcatcgcctgcctgctttttccggttttttgtgttaccggcagcttttttcactgcggttttccgtacgattttccgtgccgttattcacgcggtcggttgtctgacgatcgctcttattgcggctttgtttctggcttttgtttgtgtaattcttgttttcggaatttgccatgtgattcaccccttccgaaagctattatgcgcacggtacgcgcgtttatgtaccgaatttatgaaattaggaaaggtggggcggccatggaattgcccgcagcttttgaaaaacgaatgcaggatatgcttggggcagaatatacggcgtttcgggcgtcttacaacgaaccgcacaaacgcggcattcgtttgaacactgtaaaatgcacaaaagagcagcttgaacgcgcactgccgtttacactggttcaaacgccgttttcgccgctctcgttttatgcgccgacagataccaaaatggcggcgctgccgctctatcatgcaggcgcgttttattcgcaggagccgtccgcgtcttcggccgtcacgcttttggcgccggagccgggggataaggtgctcgacctctgcgccgcaccgggcggtaaatccacgcagattgccgcgctgaccggcgacaccgggcttttgtggtcaaacgaagttgtgcgcaatcgcgccgcaattttatcctccaatttggagcgcatgggcgtgcgtaatacagtcgtttccagcgtatacccggagatgcttgcggaaaagctcggcgggtattttgataaagtgctcgttgatgcgccgtgctccggcgaaggcatgttccgccgcgatcccgttgccgtgcaggaatggagtcctgagcacgtggagacctgcgctgtacgtcagctcgcaattttatcctccgccgcacagtgcgtgcgcgaaggcggcattttggtgtactctacctgcacattctccacggaagaaaatgagggcgttgtgcagaaatttctcgagagccacccggaattcgtgctcgaaaagccgaatgtcacattcggtcgcccggcctatggcgtagacgctgtgcgcattttcccgatggacggaggtgaggggcactttgccgcgcgcttccgccgcgttgcgccatgtgaagaacgttttgcgccgtttagctttaagcccgaccgagagacgcaggcgcatgccgaagaattgtacacatctctgtttaccgatgtaccgggcagattccagcgcgtgcgcgaccgtgtgatcttattgccaaatgagctgccggacattgcaggactttccgttctgcgcgccggtgtggaattcggcgaggcaaaaaagaaccgcatcgagcccgcgcatggcattttcatggcaagccgtgcggaaaactgccgcagcgtgctgcatctcacatcgaacgatcctgctttattcgcgtttttgcgcggcgaagaaatccccgcagaggggctttccggttacaccgccgtcgccgcagacggtattgtaacgggctttggcaaggcatcgaacggtgttttgaagaatcgttacccaaaggggctgcgcacacacctgtaaaggtgcattcgtttatacaaaaagaacagaaagcttcgcaaagccaaatggttatttgtgaagctttttttgcaatttaaacctcggtaacttgcaaaaaaggcaaatacgtgctaaaatgtgtataagcaaacaggaaagaagtgttttttgatgcagaaaatccagattgagcgtaccactgcgcctaaagcgaagccggcagacgaaagcaagctcggtttcggtaaaatctttacagatcacatgtatgtgatggaatataacccggagcagggttggcacgatccgaagatcatgccgtatcagccgatcgtccttgatccgtccgctatggttttccactacggtcaggaaatgttcgagggcatgaaggcttataaatgcgcagacggtcgcatccgtctgttccgcccgaacaagaacatcgagcgtgcaaacaactccaacagaagactttgcatcccggagatcccggccgatgatttcctcaatgcgatcaagacgctcgtcgccgttgacgcagattggattccgagccgccccggcacttctctttatattcgtccgttcgtcattgcaacggatccgttcctcggcgtacgcccgtcgaacacctataaattcatcatcattctttccccggtcggcgcttactacgagagcggcctcgacccggtaaagatttggatcgaagacgactatgtacgtgcagtccgcggcggcatcggcgaagcaaagaccggcggcaactacgttgcaagcctcgcggcacaggtaaaggcacacgacgaaggttactctcaggttctgtggctcgacggtgttgagcgcaagtacatcgaagaagtcggtgctatgaacatcttcttcaaaatcaacggcaccgttgtcaccccgatgctgaacggcagtattttgccgggcgttacccgtgcatcctgcatcgatctctgcaagcactggggtctcccggtcgaagagagaagaatctccgttgacgaactcgttgaggcggcccgtaccggtgcacttgaagagtgctggggtagcggtaccgcagccgttatctccccggtcggcgcactccgttacgagaacgaagtcatgcagatcaaggacggcggcatcggcgaattcagccagaagctgtacgacaccgtcaccggcatccagaccggtaaggtagaagataccctcggttggactgtggaagtcacaccgcttgagaagtaattcgaatatttgaacattcaaaaggccgagcccgcgtggttcggtctttttgtataaaagaagagctctgcgaccggcaaaagccaaatgcagagctcagtttatatccgaatcagtttttctgtataatccatgttcgcagggcggcgatgctctgtgcacaggctgtaaagattatccgcgcgcgcttccaacgcaaacacacgtctggcttccggcgaaagcttcttcacgtccgcagggcgtgcgatgattggcagcatcggcttcgctttgtgcaggatctccgcgccgcggctcgtcatacctaaaatgcgcaggtagggaggcaaattgggcagatcgttcgtgatgcccaaatacgcgcttaaaacaatacgccgaatacgcgcgtgactgtaccgcttggttttcaccgcatcaaacagccctgtgcacgtttccgccgtttcggcagccgccaaaatgcggttttcaatgccctctgaaacatccggcacgcggcgcaggtctttgggtgacatggcagagacagccgccagtaccgcacggtcgagatacgaaagggaagtggggtactgttttttgttttgcagcgcgcgaatacacaccgccgtattttccgggacatacgaggaaatctcttcaccctcgatgctcctgctgcggatcaggctcgccgatgcaaacgcgccgtgcacttggtcgctgtcgtggccaatcgcgatacgctgcacagtctgcggcacgatattagaattcaacgataagatcgccttgcaatactctatacccaaaatgcaatttggctttgtgagcagctctgcggtttctgcgccgagcgcctttttcacagcctccgtacgcgccgccgcaaacgaaacgccttttgcaacctccgggcgaatatccgaattaaacacatcggagtgcaagtattccgcgcagtgcatgaggggagcggtatcgccggtttcgctgccaaacgtcagtgtatctacgcaaccgagcgcatttaataacgaaatgccgccgagcgcaaatttttctgcgcctgctacagcccacggcaagggcagctccagcacgagtgccgcgccgttttgaagtgccagccgtgtgcgagaccacttatcgagcacagccgcctcgccgcgctgcacaaaatttccgctcatcacacagacaatgtcgctgccgaactcctccgaaatgcgggagagcagtgccgcgtggccgttatgcagcggattaaactcgcaaacaacgcccgaaatcttgttttttccaatcattttataggaaactccttgaaatttacatgattttgtattatcataagtataaagcaatgaagatcaatttacaagccgcgtttccttatttataattttggaagtgtcgtgcttattttttgtgcgtttgcacagatgatccaattcaaatttaaccatgattcagggggaagacgaaatgaaaattctggtcatcaacgccggcagctcctcacttaagtatcagctgatcgatatggacaacgagcaaatgcttgcaaagggcaactgcgagaagattggccttgaaatgggcattttcggccacaagacggcagacggcagagagaagaagatcgaaatccgcatggcgaaccacaccgaagcgttcgagcaggtcaagaacgcacttctcgacagcgaagtcggcgtcattaaggatctgagcgaagtcgctgctatcggccaccgtatcgttcagggcggcgcgctcttcagcgagtccgttctcgttgacgaaaaggtcatcgagggcatcgaaagcctcatcccgcttgcaccgctgcacaacagcgcacatgtacagggcattcgcgcctgcatgaacgttttcggcaaggaagtcccggaagttgtcgtgttcgatacggctttccattccaccatgccgcagaaggcttacatgttcgctgtgccgtatgagtactatgagaagtacaagatccgccgctatggcttccacggcacctcccaccgctatgtcagccaccgcgttgcagagctcatgggcaaggacatcaaggatctgaagcttatcacctgccacatcggcaacggttcctccatcaccgccatcaagaacggcaaggtcatcgacaccagcatgggtctcaccccgcttgacggcttcatgatgggtacccgtaccggcacgcttgatccgtctgttgtcacgttcatcgcagagaaagagaacctcactccggcacagctttccgacctcttcaacaagaagtctggcctgctcggtatctccggcatctccagcgatgaccgcgacatctgcaaggcagaggacgagggtgacgagcgtgcacacctcgcacatgagatgctcgtttatcagattcagaagttcatcggcagctatgtcgctgcgctgaacggcgtagacgcaatcgtcttcaccgcaggtcttggcgagaaccaggataccctgcgcgagcgcatctgcaccaacatggaatacctcggcatcaagttcgatcacgaagccaacaagggcgttcgcggcaaggagaagaagatctccgcgccggacagcaaggtcgctgtttacatcgtcccgaccaacgaagaacttgtcattgcacgcgatacgaaagccatcgttgaaaagctgtaatttcacctgaaattcgataccggatccgtttttgcgggtccggtatttttcatatttaaattttaagtgaaaatcgcgggtttattttctgtttttggcttttgaaccgcaaaaatggttgcaaatttgtaactattgtgttatgattgtaactgtataaaacgatctgtaccatattctgccgcaacaggacagaaaccggcttttgcttctacaggtcgatgccttgataaggataggtgaaaacacatgcaatatagaaaaagaatgctccaaaagaagggcacggctctgttgctttccgcgctgctattggcttctgcgctgccgcttgcggcttatgcggaagaagtttccgcaaaaacgaccgaatacgtgaacttccgctccggccccggtacgaattacagctcgcaggggatcatcgcttccggcacgaccatcacggtaacggatacgagcaattccgagtggtacgccgtgcgtctctcgaacggctctacaggttatatctacgccgagtatatttccatgtctaccggcggcagcacaagcaacggggaagaacgcagtgccaaaacgacggaatatgtgaattttcgttccggaccgggcacaaattacaactctaaaggcgtcattgcattaggcaccaccgttacggtcaccgacacgagcaatgcccagtggtacgccgtgcgtctttctaacggctctacaggctatatttttgccgaatacatcagcttcacgggcagcaatacgccgtctgctacggcggcacctacacaggcgccatccaacggttccgagcagaccgcaaaaacgaccgaatacgtaaatttccgttccggccccggtacgaattacagttctaaaggcgtcattgcattgggcaccaccgtcacggtcaccgacacgagcaattccgagtggtacgccgtgcgcctctcgaacggctctacgggctacatatttgcgcaatacttgaagctgaacagttcttcctccgcaacggcaacgcccgcaccgacacaggcaccgagcggttccgagcaaagcgcgaaaacgacggaatacgtaaacttccgttccggtcccggcacgaattacagttctaaaggcgtcattgcattgggcaccaccgttacggtcaccgacacgagcaattccgagtggtacgccgtgcgcctctcgaacggctctacgggctacatttttgcacagtatttgaagctgaacagttcttcctccgcaacggcaacgcccgcaccgacacaggcaccgagcggttccgaacaaagcgcgaaaacgacggaatacgtaaacttccgttccggccccggcacgaattacagctctaaaggcgttatcgcttccggcacaaccgtcacggtcacagataggagcaactctcagtggtatgccgtgcgccttgcaaacggctccacgggctacatctttgcacagtatttgaaggtcaccggcacgtcgtccgcaacgcctacacctacgcaggcaccgtccaatgatggcactgtgcaggctaagctcaccgcagacgtaaacctgcgccgcggtgcaggtacgaattacggcgtcatcaaggtcatcggcaccggcaccaccgttacggtcacggacgcgtcgaacagccagtggtacaaggtaaagctttcggacggcacagagggctatctgttctccgaatatctgaaagttacttccggcaatattgattctgccaagccttccgcaacgcccacgccgaccccggcgccgagcaacggaaccgtacaggccaagaccacatccgatttaaatgtgcgcaaaggccccggcacaagctatggcatcatcaaggttatcgatatgaacgttaacgttaccgttacggaagccacaaacagcagctggtacaaagtgaagctttccgacggtacagagggctaccttgctgcgcagtacttgaagattacctccggcgatatcaactccgtaaagcccggtaacagtggagatgataacaccaataacggcaacaactccaatgcacccgcaacagacgaatacgtccgcgttacggtcggcctcaacctgcgttccgagccgaacacgagctgtaaagtactcaccgttttgagcaccggcaccgtgctgaacgtgcttgaccgcaaaacgagcggctgggtgcatgtgcgtacgaccggcggcgcagagggctatgtctcggcagaatatgtcacagcatatgacccgtcttcgtccagtgcatcgatctctgtttcttccgtcgatctcgcacagtataagaccatctacattcaggcttcttcttccggctctgtcacgtgggagagcagtgatgcttccgttgcaacggcaaaagccggtgtttccggtcagctcttcatttacggcgctgcgccgggcacggccaagatcaccgcaaagagcgcaaatggcactgcacttgccaccgtttccgtcacggtctccgcgccggaagctgtccgctttgcgtacacaacaccgaatattatcacagccggttcatccttcaatttgaaggcggttacggatacgcagaaatccgccgtgcgctttgagattgatggcgtcggcacctacgataccacgtcctacgattccgaaagtcagggcgacaacaacgtccgtattttctctgcttcggctacaatcagtacacctggcacctacacggtgcgtgcgtattcgtcttccggcggcggttattcctccgattacagagagttcaccatcctcgtcgtctctacaacggattccgatacgacaacaggcgagagccgccgcgtaagtgacagtatgctcgacaacatcgcctcttatgaaggctatgtcccacaggtttcgccggacacgcttgccggcaatatcccgaccgtcggctacggttacgttgtttccaagaacaccacattctacaataacctgacccgctcggaagcaaaggccatgctggccgataccgtcaaccgcggctcttacaccacagagatcaaccgtttcatctcgagcaacggccttttgatgagccagtgccagtttgatgcgcttgcaagcttctcttacaatgtcggcgcaggctactggaacggctccggcaactgctacgtgcgtacagtcatcatgaacaccgttgttccgccgcaggatctgtcttcttccaatccgtacggcggtaaggtaacggcttccacactacccatgtatcaggaccacagcgcttcttccacgcagattactacgcttaagatcagcacaagtgtgaacatcctcgattattaccgcgactcaagcacgaagcagagctggtacaaggtctctgcaagcggcaagagcggttgggtgcgcgcaggcgatgttgctttcaacagcacctctggtctcacgcatgacctgaactatgtggacgcctacacattcggcagcaatctgctggattggcatgtggcaggcggcaactgctacatcggcctgtattatagacgccttgcagaagctaaggtattctcctacggcaactacgccgaggcatcgccctctaacggcaactataagaagaatacatacggttacaaagtcccgagctgtctgtaaagctaaattacttttcatagtcctaaaattaagctgtgcattctaatggagtgcacagcttttctttatatgctcggcgatgtgtaaagttttattactttacgtgttatttataaaacggcaagccgactgctttcactcagtcggcttgcttttatattatgcgatcgaccgatcagcagccacagccgccgcagccgttgttgcagccaccacagttgttgcagccgcaatcgttaccgcagccacagccgccgcagcacaagaggatcagtatgataatgatgatccaagagcaacctccgccaaaaccgttacacatgattgaacgcctcctttcgtttacaatacagaatatgaaagtgggggaaatgtgtgatggtcaaatcaaaacttcaaaaactttttaaattcatgcatttcagttagtattgctgagaattaatttgaaatagagagatattttaatgtaattacggaaaatcggataaaatcacgcttgacaatacattcgttttgcttataattaaagtcaaggaaagtcaaagacaaagaaagaacaagaggcgatcagaaatgcgaatcagcgacagcgttgcgaattacatcttacaaatgctcaatgatgaaaacggcatcgcggagatccagcgtaatgagcttgcaaacacgctgggctgcgtaccgagccagattaactacgtcatcacgtcccgtttcacaccggagcagggatatatcgtagagagcaggcgaggcggcggcggttacattcgcatcattcgccggagcatgacaaaatccgatttaatcatgcacattgtcaattccatcgggcctaagctggacgcagcttctatgcgcgccatgctgcggaatcttgtggaaacgggcgttgcgtccgaatccgacgctcacctgatgatggcagggctttcggattcggcacttgcaccggcgccaaaagaaattcgagatcaactgcgggcatcgatcttcaaaaacatgttgctcgtactaaatgtataaaaagccattttgaaaggacgggatgacttatgatgtgtcagaactgcggaaagaatccggcaacgacccacattaaaaccatcgtcaacggcaagttggcggaatatgacctttgctcggaatgtgcaagggcaaaaggctacaagagcttttttaactttgatgatatggacttcgatttcaacaatctgctcggcagcttcatcggtgcgccgaccgggcgcagtaatgcgatgcgctgcccgaaatgcggtgcttcctttgaggagattgcagaaagcggcaagatcggctgcgcagagtgttacaatgtgttccgtgaccgcctgatgccgactatccaccgcatccacggtgcagcaaagcacaagggcaaagtacccggaagcaatgcgctgcgcattgtggaaccggcaggtaagattgccgttgtggaagaacccacgccgattgaaaagaaacgtgcggaactgaaagaagcaatcgaaaagcaggacttcgagcatgcagctgagctgcgtgacgaaatcaaagaaatggagaaaggagatgggaaccatgcttaacgaagaaaagaaatggtatgaaaaagcaggtaaagaaagtgacgttgtcatcagcacgcgtgtgcgtctggcgagaaaccttgcagatatgccgtttccaaaccgcatgacgcctgaccagaaagcagccgtagagcgccgcgtacgcgatgcgatcctcagcggcaacagcgccatcgcatcggatttcgacttcgtgcagatggatgacctcagcaacgagcaggcggtgtcacttgtggaacgccacatcgtcagcccggagttcatcgcaaacgcaaagggacgcggattcctcatctcaaaggacgagtgcatctccattatggtgaacgaagaagatcacgtgcgtattcaagtgctgcatgagggtcttgcgctcagcgaagctgccgaaatggcagaccgcatcgatacgcttttaaacgaatcgctgcgttttgcgtttgattccgagctcggctacctcacccagtgcccgacgaacctcggtaccggcatgcgggcctctgtgatgctgcatctgccggcactcaccgaaaacggcgcaatgtccagaatctccacgaatctttcgaagctcggtcttgtgattcgcggtacatacggcgaaggcagcaatgtcatcggcgccatgtatcagctttcaaaccagattacactgggtctcagcgaaaaagaggctgtggaaaacttgcagaacattacgatgcagcttatttccgaagagcgcaaaacgcgcgcttcgctcagcaagaacatcaatgtgcaggacaaagtaggccgttccgccggcgtgctgaaaaatgcacggctgctttcctgcgatgaatatatgaagcttatctccaatgtgcgtttcggcattgcggaaaagcttttaagcggtataacgcttgaagatattcacacactgaccgtagcggtacagccggccaccatggcagccgcacacggcagcaacctttcggcgggacaaagagacattctccgcgcagacgaggtgcgcaaagccctcaaagcgcttcaataatagaaaatcagtaaagagaactgcgatacggcagtgatcgaaaggacggatttatatgtatagattcacaggttttacagagaaagcaaacaatgccatgaaccgcgccatcgaaaaggcagaggagcttggccacaattacatcggcagtgagcacgtgctatacggcttgattgcagagggcagcggcgttgcgttcaacgtgctgaataagctcggcatcacggcagacgattacgaacgcctgatgcaggagaagatcggcacatcttcgccgacgaacctcaccaccgcatatttcaccccgcgcacaaagcgcattttgcagatggcaaagctcgcggcctccaagctcggcagcaactatgtcggcacggagcacctgctcatcgccatcattgaagacggtgaaagctttgctgtgcgcttcttacagatgctcggtgttgacccgcagagcgttgcgaatgcgttgtcctcggcgctttccgacggttataccgtcgataaagcttccggcaacgcgtatccgaaggacgaaaacggcgaaaaggaaggcggcagtgcacttgaaaagtttggccgcgacctgacaaagctcgcagccgaaggcaagattgacccggtcatcggccgtcataacgagattgaacgtgtcattcagatcttgtctcgtcgtacgaagaataatccggtgctcatcggtgaaccgggcgtcggcaagaccgccgttgcggaaggcttggcgctgaagattcatgaaggcgaggtgccggagctgctgaaaggcaagcgtctggtggctcttgatcttaccggtatggtcgcaggctctaagtaccgtggcgattttgaagagcgtatcaagtccgccatcgacgaagtgaagaaggacggcaacgtcattttgttcatcgatgagctgcacaccatcattggtgcaggttccgcagagggctctgccgatgccgccaatatcttaaagccggctctggcgcgcggtgacttccaggtcatcggtgcgacgaccatcaacgagtacagaaagtacattgaaaaagatgccgcgctggagcgtcgtttccagccggtacatgtcggtgagccgaccgaagaagaagcggtacaaatccttgaaggtctgaaagatcgctacgaggcgcaccataaagtacagatcaccgatgaagccattgagagtgccgttaagctctcctcgcgctacattgcagaccgttacctgccggataaggccatcgacctcgtcgatgaagcggcgtcccgtgtgcgtctcagaacgttcactgcgccggaagacctgcaggagatggaaaagcgcatcaaggaagtcgagattgataaggcggctgccgtcaacgagcaggacttcgagcgcgcggccgagttgcgtgacaagcagaaagcccttacagaggagctggagcagaaaaagaacgagtgggctgcaaagaacgagcgcagcaacagcgttgtgaaggcggaagacatcgccgagatcgtcgccatgtggaccggcatcccggtcgtacagctgacgcaggaagaaagcgagcgcctgctgcatcttgaagatacgctgcacaagcgtgtcatcggtcaggatgaagccgttacggccattgcaaaagccatccgtcgcggcagagtcggcctgaaagataagaaccgcccgatcggctcgttcattttcctcggcccgaccggcgtaggcaagaccgagctgtgcaaggcgcttgcggaggctatgttcggtgacgaaaaggccatgatccgcctcgatatgtcggagtatatggagaagcacacggtgtctcgtctcgtcggttcgcctccgggatatgtaggctttgatgagggcggtcagctgaccgaggcagtgcgccgcaagccgtattccgttgtgctgtttgatgagatcgaaaaggcacacccggatgtcttcaacatgctgctgcaaattctcgatgacggccgtctgacggattcgcagggcaaggtggtcagctttaagaacaccatcatcatcatgacctccaacatcggcgcacgtctcattacagagaagcagcaagagcgtctcggctttgccaccgcggacaacaagtcgacagaagaagacagcgcagtcgccgatttcgagcgcacaaaagagctcgtcatgggtgagctgaagaaggtgttccgtccggaattcatcaaccgtgtcgatgacattattgtgttccgtaagctcctgcacgacgacatccagaaaatcgccggcaaaatgctcgagggtcttaagggtcaactgcgcgacatggacatcgcggttgagttcaccccggctgccgtggaagctgttgcaaacgccggttttgacccggtttacggtgcaagaccgctgcgcagagcgatccgcagcaagatggaagacccgatttccgaagagatgctcgagggcaacatgaaagcgggcggctcgtatgtctgcgacttcaaagacggtaagtacgtcattgaagacaaggcaaagaagagcggcgacgaaaagtcgagcgaaagcgaagcaaagtaatcacacccgttaaggcaaatgtcctttaaagacacatagaaaggcggtctgccgggtagaaaaaatccgtgcagaccgccttttgctgtcctaaatcacgcaaacaccgtctcaatgtgctttgcgcactcgggcggagaatacgtgaacttatcaatatggtcgccctgaaagaaatatacaggcggctcgggtttataggtgtaatcaaagcattccacaagcacgagcttcaccttcatgcggttcggcagaatacttttgatgaacacgctggcctgctgtccggcatggacgttttctttcagctcggcaagtcctgcaaggtttggggtcagctccacaaaaatgccgtagctttccacgctgcgcacgatacctgcgaccgtttcgccgacacgaaagcgctccgcgttttccgtccacgtgccgagcagctcgcggtggctgagcgtgatgcggttctcgtccttcatacgcaccacggcgcgaatatccatgccgaccgtgaaccgctccttcgggtggtcgatgcgcgaaacagaaatggcatcgatgggcaggagggaaacaataccgcagccgatatccgcaaacgcaccgaacggctccaaatgcgtgatgcgcaccgggatcacatcaccgcaggtaagccctgctatgtactctgccatgcagcgctcctgtgcttttcggcgcgacaacaccgctgtgatcctgccgaacgcatcacgaataaaatccgtgatgataaagcacacaggcttattcacacgtgaaatgatggcgatgtcccgcacggtgccctcgcgtatgccgagcgcgccctcttcgcgcgggataatgccccgcatacatttgagatctacaatgaggttgtgctcgttgtcgcagatgatactgcgcgcctctaagatttttccgtcgcgcattgcgtcggagagggcggcaggcgtctgcatactggctttgttttccgctttgtcgatcaaatgaccttccgggtaaaatttcatgtacttcactcctttttaaggccgtgccgcgcaaaaaacgctttcggctgcgccttaactacgccgaagtatatgaacctaaactttcatttatgcgtttctgaacttttcatgaagataaacaaaagggcttgcatgtttttaccgtgtatattaaaatagatatacagatgcaaagtatgtctttgcaaaagaaaggaaacagaaaaaatgaagaaaatgaaactgctgtgtgcggcgttgaccgtaatcatgctgctcacagcttgctccggcagcacctcttctgccgcagaaaaggtcatcggcactacggataaagttgttgcggcagatactttaaagcccttggcaaaggccgacaaagaaaagctcggctatcagctcgatatgccggaaaaaggcgaggagatttgtgtgctgacaacgaactacggcaccattcgcatgcgctttttcccggatgccgcgccgaaagccgtgtacagctttaaatctctggcgctttccggatactatgacggcgtcactttccaccgcgtcatcgatgatttcatgattcagggcggtgacccgcttggcaacggaaccggcggcgagagcatttggggcgagaattatggcgacgaatttcacgaaaacctcgtcaacatcaccggcgcggtctcttgcgcaaacagcggtgccaacacaaacggcagccagttttttataaactgcacggaaccgggcaaaatagactgggatacctacgaccagtattatcaggtctataaatctgcaccggaacagttcacctccatatacggcggcacgctcgatatggataaggtaacggatgcctacaaagaactttacgataaaaacggcggcaacacacaccttgacggtgcatattccaccgcaggtaccggacacaccgtgttcgcacaggtatttgacggcatggacgtggtgcgcagcatcatgggcgttgagaccgactcgaacgataagccgcttgaagacgtcaccattctctccgcagaaatcgtaccctacgaataaatttcttaaacaaatttagtataatcccaaatcattttaaggaggaagtttccatggcaatcgtacatcccacagctgaaaatttcgacgcattgatccgcgataacaagcttgttcttgtagacttttttgcaacatggtgcggcccgtgcaaaatgatcgcaccgttcattgaggaagttgcagaagaatacgagggcaaggccgtcgtcgcgaagatcgacgttgacgaagcgcaggaaatcgccgccgaatacggcatctccagcattccgaccgtcatcctctttaaagacggcgcccccatccacaccgaagtcggcgcacacgataaggctttttacgcaaacctcatcgaaatgcacctgtgaggccgcgccatgttcacctttgaacgcaaagcgaattactacgagaccgaccaaatgggcatcgtgcaccactcgaattacattcgttggtttgaggaagcccgcttggagatgctacgcgctatgggattgccgtacaaaaaaatggaagataacggcattctgatccccgtgctggatgtttcgtgcagctacaagcacccaattcgctttgatgagacgcttgtgcttacactgcgcattcaaaactacaacggtgtacgctttgaaatggcgtatgaggggcacagcaaggagactgggcttttgagttgcaccggtacttcgcagcactgcttcacaacacccgcgttaaagccgatccgtatgcagaagcattttcccgcatggcacgaagtatttcttcaggccgcagagcaggacaaagcagagtaattcaaaacacaaaaatgcccgccgggctgaccgatgtgatcggaaagcccggcgggcatttttataaatctttagtttttattcatgtcgcaaagcatcgatcgggttcaggtttgccgccttgaaggaggggagaagcccgaagatgatgccgatgaccatggagaacaccacggcaataatgatggatggcacgctgatggcaaccggagcagacgtcacgcgcgatatgattgccgcaagaccgataccggcacccacgcccacaatgccgccaaggcttgtcagcacagcggcttccgttaagaactgccacagaatgcggctctttttcgcgccgatggcttttttcagaccgatctctcgcgtacgctccgtaacggaaacgagcatgatgttcataacgccgataccgccgacgagcagggagatgctcgcaatccagatgagctgcgaatttgtggagctgctgagatcctgcaagtcctgcgcctgctttaaaagatcctgtgcctgatacttgatctcgctgttcgttacgttcgtgttcatgatctccgccacagccttgccggcatccgtcatggcttccgtattggaaacgcgaatggccacgttctgcggctcatcgaacgaatagagcgccggccacatggagcttggcacgaaaatacgagaggcagagctatccgagtaatacgtataatactcatcgatggagttgatgacgggctcaaacttgctgtcttcatctacaacgccaaccaccgtaaacggaatgctgctgatctcgatcgtttttccgatggggttttcgccgtcaaacagcgaatccgccgtatcggcatcgatgatggctgccgcgtggaaatccgtaaaatcactgtccacaaaggtgcgaccgcttttcagcaccaacccattcgtcgtgaaatagctgttatccacgccgaagacctgcgagccggaaatgccgttgttgccgtagtaaacggagttgttgtagtcgctgcggctggtatagaacgccgcatcttccacgttttttacggacttgattttttccatcgtggtctcgtcacgcacaggaatgccgtccggcaagccgttatacagcatttcgtactgataatcgccctgatacagctgaatctgcaccgtgtttgtgccggagccgatgaggttctttttgatttgctcattcgtgcccttgatggtggacacgatggagatgatagaggcgataccgatgatgatgccgagcatcgtcaggaacgagcgcattttgtgcgaccagattccctgaaatgaaagtctgatattttcaatcatgcgtcaagcccccttgcgtcgatgccgtcattttcgtctgtgttttcttccatgccgttcgccttggcaccatcaattgccgaagtgccgtaggggaaagccacataatcttcttccgtcaaagtatcgctcttgatctccagatactggttgtagatcgtcttgccggttttgatatacgttttatgcacacggttatcgtcgccgaccttcaaaacatacttgccgccgtcatcgctgcgaatatacgctttaaaaagatatattgcattgcttgcgttatccgaggccgcctgcaaagtaatatcaaggcccatgccgtttttcaggccgtccgcatcggcaatgcgcgctgtaaactggtacgtggagctgtttgggtttgaggagccgtcatagtaataattggaattgtcattcggaaaatcggagatctgtacaatctctgcctcatacatttgtccgttctcccaagagctcgccataaccgtgtcgccgacatgcaccttgccgagcagcgactcgtttaaggatgccgttatatagaaaccgtcgccgcccgaaaccacgaggaacggggagcttgtggacatcgccgtatcgagatctgtgagcgacttcacaacgccgttcacggtcgattttattgtagcgttttcaagatccagcttcgctttttcaaggtcatgcgccgcttgtttcacattcagctttaaatcttgaatctgctgctttttatcggcgatcatctgctgcaattcttccgccgtatacatggagcctccggtatcgtagctgatgcccggatcggcgtaggagagatccggcatttgaatgtcatccggctcgctgataacttcattaaagaagcccgcggaaatcttatcgccgtccatctgccagccctttacaagcggcagattttcgttatcctgttcatgcacttcaaagcgtgcgacaaacgggccgtccggcaatgtgaaatcaggctccggcgtgggtacgctttcgccgccggtctcattcgtttttgtgaatgtcatctgcttgaaccacgccataccggaaaccgttggcgcttccgtgggttctatgggcggcgcgggagtaggggcttccgtcggcgctgtggtgggctccgcagtcggttcgggggtaaccatcggctgcggcgccgccgtgggcacttcactcggctgtgccgtaggctctgcgctcggtgtgggggtcggagtgggggtaggggtaggggtcgcacgcgggtctgtcacgccgagcagcttcaagagaaagcccttcgtcagcacagcatcttccgtgcaaagaaagacatacgggtcttcctccgtaccggcacctttaaacggcttcgagtgctctgtaatctccgtatacagttccgcctgcgattccggcaccggcgtgggagtgggttccggctcgggctccgggatagccggctccacatacggcgccgtattctggagcttcgtaagttctttttcggcctgctccagttcgtatttcttctttttttcttcaagctccttgctctctaccttcagctggagctttgtcgtatcatactgcaaaagcgtatcgccaatcttgacagtatcgccctctttgacgaaaatcttagaaatagctttttctttatcggggtaaagttcctgcacaaagtcacttgtagcattaccgtaggtgctggactggtcgccccaatactgcgtggagatatttgaaacctgctccacatccaccgtggcatttgccgccttgccgttcaccgcgaccgtcacgccggtgatgatcagcgcgatcacgatcactacggagaccaccgtgataatgacttttttaagtgggaaatttgccggcagattcatgcttccgcctccttttcctcggggatatgctgttccgcaaactgaccgtcgcgaatatgcagcacacgctttgcgtggtttgccacatcaatgtcatgcgtgatcatcacaacggtcacaccctcgtcgttgagcgtctggaacagctccataatctgcgcgccggactgactgtcgagcgcgccggtcggttcatcggctaaaagaattttcggattgttgacgatggcgcgggcgatcgcgacgcgctggcactgaccgccggaaagctggttcggcttaaaatccacacggtcgccgagacctacacgctctaaagcacgcacggcacgcgcacgtcgctcttttttcggcacacctgcgtataaaaggggaagcgccacgttttccgccgcgctctggcgaggcaaaagatgaaagctctggaacacgaagccgatggagttgaggcgaatttccgaaagcttcgattcgctgctgccgatgatactttcgcccgcaagtgcatacgtgcctgaagtcggcagatcaaggcagccgatgatgttcatcagcgtcgttttgccggagccggacggacccatgatggcgacatattctccctcattcacagaaagagagatgtcttttagaaccggcacttccattttgccttgaatatacgttttataaatgttgtgcagctctaagatcatgccgtagcacccccgataacggttccaagactcgccgcgccgtcattttcataggtggtcacgccatctgccgtgcttgcttctccggctgccgtgtctgtttcgccctctgactccgttacggcactttctgcgggcatggggctgtagccgttcgggttgccgtccatatcgctgccgttttctgcgggcataacaccgtttgcatcgtccgttttggcatcgttcatgtcaccggaatcattcccctgattcttataagaaatatcatccgtagcatacatgccgctgtgcacgcggtcttccacaacggccaagcgatcgtctgccgtcacgccggacgtaatctcatattcggaaagggtatcgtcaaacttgccgagctgcacttcacgcttttcgatgcgattcttatcgtttacggcccaaacgtagtttttgctgccttcgttgagaatatagtagcttggcagccaaattccggtcttcacgtctttggcctcatccggctccacgtaaacgtgctgaccgagcatgagacctttgaaatcatcgagcacaaggtagaagttatactttgtcgcctttgtaaacgagctttcggaaccgtaggaaataccgctgttgttattatcgtttgcggcttcgcgttcaacgctctccacggtgcccgtccaagtctgctccgggtctacgcgggagacgaccttcattttcacgcccttctgcaaggaatagacattcagctccgttgccgtgccttttacacggtaagaacccgtcgcgagaatcgtaatatacgcgttcgtagaattgctgccgcttgtgttggtattggaaccgtcattgatctgcttcacaacgccggccatttctgctatgacatccgtattttcaagcgattttttgaggttctcgatctctttcgccttcgtagactgatcgtattccgtcgatttcacttcaagctgcgcagactgaatctgtagggtataggaaagctgttcgtcggaagacgctttgttcttttccttctgcagggaatcaatctgctggttcagcgtggaaatgcggtttttaaggctttccagctgtaactgcgcctcttcaagctgcatttgcaggtcgtccgtatcgtagctgaacaacttatcgccaactttcacttcctggccgaccgtcacatacagctctgcgattttctttgtatcgtccttctgcacggagagcgtcttttccggttccacaacgccggagtatttcgccgtcataccaagtgaacccgtgccggtgatgtccgcaacgctcgtcacatacaccatctcatttgggtcgctcggcgcaacgctgccgccgcggaagaaaatgagccagattacaataccgatcacgatcacagcgccgacggcaataccggcgattgtgaaaatctttttcttagtcataaagtcagtcctttcctccgcgcaaaacacccagcgcggactctctgatggttctattatacaggtaagacaaaaaataaacaacttaagaaactcttacaaacgcaaaagatttgcaaaaatcgcgctcttgaccgcgcgtaaaatcgggggtacaatggtagcaatatagaaagggaggatctgtcttatgaaaaacgaacacatcgcttcatctgtaaccgaactcatcggcaagacgccgcttctgcgtgcgtctcgctttgcggcatctgcgggcatttccaacgcgccgcttttgaagcttgaatatttaaaccccgccggcagcgtaaaagaccgtgcggcactgaaaatgattgaagacgccgaaaaagccggcaaattgaagcccggcgcggttattgtagagccaacctccggcaacacgggcatcggcctcgcatctattgcagcggcgcgcggctaccgcgtggtgctcaccatgccggaaaccatgagcgccgagcgccgcaagctgctttccgtatacggcgcggaaatcgtactcacaccgggcaaagacggcatgcgcggtgcgattgaaaaggcggatgagatcgcgaaaagtacacccggcagcttcatccccgcacagtttgagaatccctcaaaccctgccgcacattatgaaacgaccggtccggagcttgtacagcaaacagacggcaaactcgacattttcgttgcgggcatcggcaccggcggcaccatcaccggcacggcgcgctatttaaaaaagcatctgccacaggtacacaccgtcggtttggaaccggcgacttcaccgctcatcacacagggcaaaagcggtgcacacggcttacagggcatcggcgcaaacttcatcccgaagaactacgatgcttccgttgtggacgaagtgctgaccgtcacggatgaagaagcgtacaaaacggcaaaattattggcacgcaccgagggcatcctcgtcggcatcacgtccggcgcggcacttgccgcagctgtgcgcctgctgcgcatgcccgaaaatgcagaaaaaacgctcgtggcacttctgcccgacagcggcgaccgctatttttccaccccgatctttgaataaacgaaaaggaatttcattttatggcaaaaaaatactacgccgtccgcgccgggcgcaaaaccggcatttttgaaacgtgggacgaatgccgtgcgcagacgaccggctttaaaggcgcgtcgttcaaaagctttccaacgcttgcagaagccgaagcctatatgcgcggtgaaaacgatctgacgaaagccactccggcagaaaacacgaccgcagcgcctgaagaagacagcgccgtggcttacgtagacggcagctaccacatcggcacaaaggagttttcctgcggtgctgtgctgtttttaaacggcgaagagctgcatttttccgaaaggttcaccgaccccgaccttaccgaaatgcgcaacgtggcaggggagatcaagggctccgaaactgttctgcgctactgcatcgagcatgatgtgcccttcgtgacaatctaccatgattacgagggtgtagcaaaatgggcaacgggagaatggaaagcaaaaaagcccggcaccattgcgtaccgcgaattctgcgccgcagccgcaaagtacatccgtttccgctttgtgaaagtcaaggggcactccggcgacaaatacaacgacctcgccgaccgtttagcgaaagacgcgctcggcattcagtaaaacagcatagcaaaaaggcgagctgcacggagttgtgcagttcgccttttgttatacattacggaatttcaggcgcaagcttacgcgtttttcgcttcgtcgtacgcgtccttaaagcgctgcatcgcggcgttgagcatcttttcgggacctgcgaggtttacacgtgtatgcatggtgccgccctgcgagaacagcgtgccggcgtcgcagaaaagatcatgcttgcgcaggagcttatcgagcgcttcatcatcgagaccgaacgtcgtgcagtcgatccacatgaggtacgtgccctgcagatcgctgtatgtaacacccgggcagtttacgtcgatgaacttgcagaagttcttgtagtttttgtagataaggtcgatgacttctgcaagccaaccttcgcactccgtgtagccgagacggcaggcctcaaggccgagcgcaccggcggacggcgtgaagtgttgctgtaaaatactctggaattttgttctcagttcttcatcgggaataacaatattcgaggtctggagcgtcgcaaggttaaacgtcttgctcggcgcagtgcaaacaagatacttcggcagtgcatccttgcaggcgtttgcaaatgccacgtgcttatgacccggcatgatgaggtcggagtggatctcgtcgctgacaacaatcacattgtgctttgcgcagatggcaccgagctttgcgatttcgtcttccgtccaaacgcggccaaccgggttgtgcggattgcagaagataaacatcttatttttttcttctgcgcacaacttctcaaagaggtcaaagtcaatcgtgtatgtctcgttcgtgttgatgagcgggcactccacgttttttctgttattgtgctcaatggtcattctaaacggataataaaccggcggcatggtgataacgccgtcgccgggatcggtataggccagaaccgaaacagccagaaccgttacgacgccgtgtgtagaaacaatttcttctttcttaatattccagtcgttgcgacgcttcatccagccgcataccgcatcgaagtattcctctgtggggccggtatagccgaggatatgcgtatcgatgtactttttcagaccctctacgatctccggcgggtttttcagctccatatccgcaacggaaagcggtgcaacgttttccggcagattcggatgctcttttgtcatctcgtcccatttgccggagccggtgttttttctggaaaccagcgtttcaaaatcatagatcattggtaattcctcccattctaaaataaagtaatctactttcaaacggtcttattcaacctcaaggtctgcaaaagagaaggtggtgcagtctacaagaccgcggtcggtcaggcgcagctccggcaggcaggcgagggggattaaagccatcgtcataaacggagactgaatgtcgcagccgatcgtttcccaagctttgccgaggttctcgacgagctcgtccatttcttcagcggactttgtgttcatgagacccgcaaacggcagcggaacacagccgagcaccttgccgttctgcacaatacactcaccgccgccgcactgaatgagtgtgtttgcagcaagtgccatatcttcgtcattcgtgccgacaacgagcaggttgtgtgcatcgtgtgcaacggtggaagccattgcgccgcacttgacgtggaatcccttgacaaagccaacgccgtgcttgccggtcttattgtggcgctcgaagacgaatgtcttcaaaacatcctgctccacatcgctctttaattcgccgttttcaaccttgagttcaacgtgacgctcatagtcgccgacatgtaccgggataatctcgatcgcacggacggttgccgtgccaaccttatcggtatgcaccttaaaggtttccggggtgatcgtctcgccgacgtgcatcgtgtcgagcgcccatgcgggaagctcagacttcggcaggtcaatcgtcagcttgccgttttctgcaacaacgtcgccgtcgatgagcacgcgggtgacacggatgtctttttcgttatcaataaatacgatgtccgcgcacttgcccggggtgatggagccgagctcgtgatccatctggaagcattgtgcgcagttgagcgtgaccatctggatagcggtgacaaaatcgataccgaaggagacggcacgacgcacgatgtgatcgagatgaccgtttgcaaccagcgtatgcgggtgggtatcatcagaaatcatggtcgcaaatcggctgtccactttgtgctccgtgattgccttggagacctcctgcagatcgtgccaagcggagccctcgcgcagcatggcatacatgccaagacgcatttttgcgagtgcgtcctccgcacgggtggattcatgacagcagcgcacgccgcttgcaatgtatgcattgaggccgcgacccgtctccgggatggaatagtgacctgtgatgattttgccggctttcaacgtttcgccggtgatgttgtgcgtcggctccgcggaagcggtgatgcccgggaagttcatcatttcgcctaaaccaacggtataatcgtgcttcatttccgaggcaatatccgcggcggtgatctccgcgccggaatcctcaaatcccggaacagccggaacgcaggagggggtcgtcagcatagccttcagcggagtcttttccgcctcttccgccatcaggtcaacgcctttaaggccaagcacattgcagacttcgtgcgggtcataataaatcccgacggtaccatgggggataacagcctttgcatattcgatcggcgtcatcatggaagactcaatgtggatatgaccgtcaaggaaacccggggcgataagctgaccctcggcatcgatgacctttgtgctttcaccgatgcagtgtgcggcatcgccgacaagtgcgatacggccgcaggaaattgcaacatcggtgttgtcgaggatttcatgcgtgcagacgtttacgagacgcgcattgcgaatgaccgtctctgcgggctttctgcccattgcaacatcggaaagcgtgcgggagcactcccaaagctgggtcttacaaaacttgaacataaaaagtagcttcctttcttttatcaagaacaacacaacggaaaagcgctgcgttttttagctttatttactctatcgggttcacgggatttttgcagaacgaattcatgcagcacaaagcacatttcggattacgcgctgtacagaccgctctgccgtgtaaaacggtacggtgacaaaagtcgttgctttcctccggcggcaagaccgcgcgcaggtctttttcaactttgagcggtacgttgctttcggtcagaccgagtcgtcccgtgatacggatgcagtgcgtatccgtcacaacggcaggttttttgtaaatgtcgcccacaacgagatttgcggttttgcgtcccacaccgggcagctttgtcagctcatccaccgtgtccggaatcacgccgttatacgaatcgcgcagcacatggcacatagcaaaaatatcacgagcctttgttttatataacccgcaggagcggatgagctccgcaatttcttcctcgctgcccgcgcagaaggcttccagcgtagggaagcgagcaaaaagcgccggtgtaacgaggttcacacgggcatccgtacactgtgcggagagtcgcgttgcaataagtaattgcagcggatcctgatattcaagcgaacataccgcgccgggatattcttttttcagcgcttccacagcaagaagcgcacgttccttttttgtcatacagacctccgaaaaagcggcgggcaagcccgtcagaatgctttacgtttattctacaactttttcattcggttgacaataccggaaaagggtggtaaatttatttttattgaaagaccgacaaataaccgcaaaggggaaaaagaatgtctgcgtttaccttaaagctcatcgcactcgtcaccatgatcatcgaccatgtcggggcgattttcttcccgcagtttatctggctgcgctatatcgggcggctttccatgccgatctacgcgtttttgctcgtgcagggctacatgcacacacgcaattttaaccgctacgcattgcgcatgggtatttttgctttgctctccgaagtgccgtatgaccttttatttcagggtacatggcttgagtttcagcggcaaaatatcctgttcacgtttttaacggcgctttttgtgatgaaacttttagatgcttccgcgaaaagccgcaatattttcatgttcatcggcgcagtgatcttgacaatcctgccgtatttcctgcatttcagctatggcgtttacggtgttttaacggtactttgtttctatttgttccagaagtaccgcggtattgatgccgtggcgtttgcggcgctgacctacgggcaatatacgcaggacggcaacacgacacagctgtatgccatcgccgccgcgatccccgtgctgctctataacggcaagcgcggcgcgctttcgctcaaatattttttctacatcagctatccggcacatatgttattgctttacgccatccattatgtgcttgcaaatcatctattgccattttaaatggaatagggtataatttgtgaagtactgcggcacataaaccgcagagcatattatttttagaagggaaagatgaagtatgtacggtgatcttctgaacacgatcggttttgttgaaaccgcagaccccgaggtcggcgaagcgatggagctggaactcaaacgccagcgccgcaatctggagctgattgcttccgaaaacattgtgtctcctgccgttatggctgcgatgggcacggtactcacaaacaaatatgctgagggctacccgggtcaccgctattacggcggctgtgcagatgtagacattgtggaaaacatcgcccgtgagcgtgcttgccgtctgttcggcgcagagcatgccaatgtgcagccgcactccggcgcacaggcgaaccttgccgtatatttcgcgctgcttcagccgggcgataccgtgctcggcatgaaccttgcagagggcggccatctgacccacggttctcctgtcaacatgtccggcgcctactataattttgcggcttacggcgttgaccccgttacgcaccgcatcgattacgataagctcatggagcaggcgtgcgaacttaaaccgaagctcatcgttgccggcgcaagtgcatacccgcgcgcgatcgattttaagaaattccgcgagattgccgatgcatgcggcgcgtacctcatggtcgatatggcgcacattgcgggtcttgttgcgggcggctgccacatgaacccggtgccgtatgccgatgtcgtcaccacaacaacacacaaaacgctccgcggcccgcgcggcggcatgatcctctgccgtgaggagtacgcgaaaaaaatcgacaaagccattttcccgggcacgcagggcggcccgctgatgcacattatcgccgcaaaagccgtgtgcctcggcgaagcgctgaagccggagtttaagacctacgccgagcagaccgtaaaaaacgctaaagcgcttgccgaaggccttacaaaacgcggcatgaagctcgtttccggcggcacggacaaccatctgatgctgctcgatctttccgacggcgagctgaccggcaaagagctggagcgccgcctcgacgaagtgtatatcaccgcaaacaagaacacgattccgaacgagcagagaagcccgttcgtcacaagcggcgtgcgcctcggcacaccggccgtcaccacgcgcggcctgaaggaagccgatatggacgtcatcgcggagtgcatccacctgtgcgcgaccgactttgatagcagtgccgacgccatccgggtaaaggtcacggagcttttgagcaaatatccgctttataacgactaaaaggagaacacgatgaacgcaccgcttgcagaccgcattcgtccgaaaacgctcgatgatgtggtaggacaacagcatattctcggccctaataaggtactgcggcgcatcatcgaatccggcaccatcccgaatatggtgttttacgggccgtccggcgtagggaaaactaccgtggcgtccatcattgcaaagcaaagccacatgcacctgtgcaagttaaacggcaccacggcctccaccgccgatattcgcgacgtggtggcgcaggtaaacacgctgcaagcggtaaacggcgttttgctgtaccttgatgagatccagtatttcaacaaaaagcagcagcaaacgctcttggagttcatcgaaaacggcagcatcacgctgatcgcttccacaacggaaaacccctatttttacgtatataacgccattttgagccgctccacggtgtttgagttcaagcccgtggaaaaagaggaggtcgcccgcgccgtagaccgcgcattccgcattttgtcggaagaccgcggcgaagaaatccggctcgaagacggcgtgacctcgtatatcgcttctgcttgcggcggcgatgtacgcaaagcaatgaacgcggcagagctttgcacggctgccgtacgaagcgaggacgagccgcgcatcaccatggaacttgcagagcagcttacacagcgcagtgccatgcggtatgaccgagacagcgacgcgcattacgatattctttcggcgtttcaaaaatccatgcgcggctccgaccccgacgcggcgctgcattatctcgcacggcttttggaagcgggcgatctcgcctctgcatgccgccgcttgatggtgtgcgcctgcgaagacgtgggccttgcgtggccacagatcatccccatcgtgaaagcggccgtagatgccgccatgatggtcggtctgccggaagcgcgcatcccgcttgcggatgccgtcattttaacggcgacggcgccgaaatcgaacagcggtgaatctgccatagatgccgccatgcgcgacgtgaaggccggcaaactcggtgtgatcccgcgcacgctgcaaaacgtgcattatgacggttcagatgtcgctaaaaaaggccaattttaccgctatccgcacgattacccggatcattggctcgaccagcagtatcttccggatgccttgctcggcgcttcgtactatcactacggagacaacaaaaacgagcaggcgtttaaagcgtattgggaaaacataaaacgaaagcacagctcataaactctattaacataacggaaggaagtgcaccgccatgaacccggcagtccttaaaaatttgtcatacggcatgtacgtcatcggcacaaaatacaacggccgcccgaacgcctgtgtggcaaactcggtcatccaaatttccagcagcgaccccgaaaaagtgctcattgcgctgacaaaagatacgcacagctgcaccgcgattcgcgaaaacggcatttttaccatttctgtactctccacagatacacctgccagcgtcatcggcgcactcggtcttgtcagcggtaaaaatgcagacaagctgaaaaacattcgccacaaggtgctcattgaaggcgtgcccgtcgtaaaggagaacacctgctgctggtttttatgcaaggtcatctccggcatggacgtagggcaggagatggtcttcgccgccgagatcacagcgggcagcgacagcgccatcggcacgccgatgacgtatgatttctaccgcagcgaaatgcacggtctgtcgccggtcggctcgccgacctatgtgccgccggaaagcacgtttgataagagcagcggcgaaagctttgtctgctccgtgtgcggctatgtgtacagcgacccgaacttcagctttgaagaactgccggacaactgggtgtgcccggtctgcaaaatgccgaaaaaggcattcgtgcgcagaaattaaatagctttttccatactacgaatgaaaggatttttcgatagactgcgcatcgcgcgctatcggaaccaaaagactcatgcagaaaaattctccgcttcacgttttggtcattcccacatggtacccaaacggtgaagataaactgatcggcgtttaccacaagctgttctgcacggcacttgcggaatacggcgtaaaaaccaacatgctctatgtagaccgtcagggactttccgcactgccgaagtaccccacgatgcagaaggtctacgaagaatcgaacaccggctatgtgacatactgccgccgtatgctagacatctccaaattcagcgcagatgcacagctcagcgcttactgccgcaccattgaaaagctctacaaagcctatgtaaagcagcacggcaagccggacattctgcacgcacatgtcaccgtgcccgccggatacgccgctgcaaagctcggcgaaaaatatcatattccggtcgtcatcacggagcactcctcctattttgagcgcttctttgagggtagcaccgcaaaatacggactctatgctgcacggcacagcgtgatgacctgcgtcagcggctatatgacggacattttaaaagaaaaacacaatatacctgccgaagttctgccgaacatcggcaacaccaaggcatttcgcggcgcaaaaaaaccgaaagacccggcacattttcgcttgacgacggtttccgcactgcgccccggcaaatgcgtggaagacgctttgcaggccttgaagctcttgcgggagcagtacccggaaaaatcgtttttgtatacgattgtcggcgacgggcaggaggaagcgctttataaaaagaccgcatctgcgctcgggctgaacgacattgtatcctttgtcgggcgcaagaccgaaagtgaaattgcggagattttaagccagaccgacgcccttttgatggcttcggatattgagacgttcggcattcctgccgtggaagcactcgcggctggcgtgccggtgatttctacacggtgcaaaggcccggagagctttttgaacgatgactgcgccgagctctgcaatgtgcatgacccgaaagatatggaagatgcaattttacgcatggctgcacggtcggacacactggacgaagccaaaattcgtgctgcggcaaagccgtttgacagcgtcgccgttgccgaacacgccgtacaaatttaccgtgaagcgctcgaaaacacaaaataaacaaaaataggggagcctgcgtttcaaaacgtacaggctcccttttctttaggaaagaccgcgcaggccggtgcttgggaggtcacctaaattgttgctctccttgccgtccggtatgctgcgcagatattcactgccgttgcggctcgcaatcgccacgccgcggatgccgccctgctttgcaagcgccacgccgtccgccttggaaagcaccgtgccatccgaaagctggtagccggagatcttgccattcgtgcggatcagcttcatgatggtcttcgcatccttgttcggtacagggttcataatgttgatattggcaggcaggttgccgatcctctgagacataaaacgatgttcctttccgtttgtaattttgttttgtcctttccgtttttccggcgcagccaaaagctgtacgtaccgattaaggcttttataagcgccgctgtgcctattgtctctccacatacggtgaatatgcaaaaagcacgaaaaaacgggcgaaattttggcgtggagcgttgcaaaggccaccgaaatgcgctataataagaccataatgactcgcgctgcggtttttacgggattgcccgtgccgggcgctaaaaacacaggaggcttccatgaattcatgcgataagcagcagcttaaaatcacggctgccaaagtcagacttggaatcatcgaaggcgtttacaacgccaaatccggccatccgggcggttccctttccgctgcggatattttcacctatctctatttcaaagaactgcacattgacccgcagaacccgaaggatccggacagagaccgttttgtcctttctaagggtcactgcgcaccgggtctttacgctgcactggcacagcgcggctatttctctgtggatgagctgaaaaagctccgccacatcggcgctatgctgcagggtcacccggatatgaagggcatccccggcatcgatatgagctctggctctctcggccagggcgtttccgctgcggcaggcatggcgcttgccggcaagattgataacaaagactaccgtgtttactctctgctcggcgatggcgagattgaagagggtcaggtttgggaagctgctatgtttgcatcccataacaatctcgataacctctgcctgattgtcgacttcaacggcctgcagatcgacggcccggtcagcgaagttgccggcccggaaccgatcgacaagaagttcgaggctttcggctttgacgtacagaccatcgacggacacgatttcgacgccatcgaagcagcttttgcacatgcaaagaccgttaagggcaagccgagcgtcatcattgccaagaccgtaaagggtaagggcgtttcctacatggaaaatcaggtcggctggcacggtaccgcgccgaacaaggaacagtatgagaccgctatgcaggagctcaccgctgcactgcatgaactggagggctgctgatatggctgaaatggttaaaaaggcaacaagagaaagctttggcgagaccgttaccgcgctcgccgctgaatacccggagatcgtcgttctggatgcagaccttgctgctgccaccaagacgggcatcttcaaaaaagcatacccggagcgtttctttgactgcggcatcgcagagtgcaacatggtcggcgttgctgccggtctggccacctgcggtaaaattccgtttgcggcgtcctttgccatgttttccgcaggcagagcgtttgagcaggtccgcaactccgtcggttatccgaagctgaatgtcaagatcgtcggctcccacgccggcatctctgtcggtgaagacggcgctacacatcagtgctgcgaggacatcgcgctcatgcgcaccatcccgggcatggtcattctgaacccctgcgatcattacgaaatgcaggccgcggttcgcgctgctgttgagcacaagggcccgtgctatatccgcctcggccgtctggctgtggaaagcatcaacaacaacgatgattataagttcgagcttggcaagggcatcacgctgcgcgagggcacggacatcaccgttgttgcgaccggtctcatggtacaggaagccgttaaggctgccgatgcactgaaagaagaaggcatcagcgttgaagtcatcaatatccataccatcaagccgctcgatgaagagcttgttattgcttccgcaaagaagaccggccgtgtcatcacggttgaagagcacaacatcatcggcggtctcggcgaagcggtctccaccgcactttccgagcattgcccgacgcctgtcacgcgcatcggtgtcaacgatgtgtacggccactccggcccggctgtggatctgctgaaggaattcggcctttctgcagagcacattgcagaggtcatcagagaaaagctcgcaaagtaagcttttccgcaggcttccgctttaaaaccgcataaaaggaattttgctccctttacaggaactgtgtgcatccgcacggtttcccgtaaagggagcttttttatattcaaagcccccgcagtaatagtaaaacgtcttcgcttgacggacacaaagaaaaaacaaaaataaatgtctgctttcacaaagaattcgaccgctttcttttttctcgcattgtacaataacggtatcagcaccggtacagatacatttcatcttgctatacggaggtttagaatgtgtaaaagcaaaataccgcgcttttcggcacatctgctgcatttggccttgttcggcagatttgtgtcaaaaaagcgtgaaaatttcgcgataaatgaaaacttttccgaatacaggcgcaaaaaagtattgattgcggcaaatcatttttatatgctgtaccgctttcgacgagagctgattgaagatctgcaatcccggtatgaggtggtcgttgcagcgccgtttcaaaccggtgaagaagtgtttgaaagcatgggcatacgctgtacggaaacgaaaatgcagcggcggcgcgtgcaggtgctttctgaattgcgtcttttacaagcgtacaaacgtgttctttgtctggaaaagccggatcttgtgcttacatacgccattaagccgaatgtatacatgggttttctctgcacgtgctaccgcattccgttttacgccaccgtacagggactcggcagcgcttttcagcgcccgtggctcagctgcgctgccacattcctttacaagctttcgtttctgcgtgtacagaacgtattctttgaaaatcagtccaatgcggtagaattttgccgcagacacatcctgccacccgaaaaagaggtcgttctgcatggtgcgggtgtagacctgaaccgctatatctacacgccgtacaccgctcacgatccgccgcgattcctgttcgtcggccgtttgatgcgcgaaaaggggatagaggagctgttttgcgccgtgcgcaggctgtggacagagggctttcacgtgcatttgcagctgctcggcttttttgaggagcagtacaggcaggaggtagaccgccttgttgccgacggcatgacagaattttacggctttcaaaaagaaccgctgccgttttaccaaaactgcgactgcgtagtgctgccaagctaccacgagggcatgagcaacgtgctgctggaagctgccgccgtcggcaggcccatcatcgcatccgatattcccgggtgcagggaagccgtagagcacagcaaaaccggccttttgtgccgcgcaaaagacgcgaacagcctatatgttgccatgcgcgcgtttttggcgctttccgcagagcaaaaagcagcccttgggcaaaacggccgccgcaaaatggagcgtgaattcgataaagcgagcgttgttgcagaaacactgcgcatcgtcaccgccgaaaaagcggcaccgcagccccggcgcgtcacggcatagaggagaacacatgtccggttatattcggatgctcctttggcttctgatttacacggcgctctccgccgtgttggaagtacagcaaagcgaaactgtctgcggcgtgcagacagtgcggttcacgaagctctgggcaacactcggcgtactgccgctgctcatcttctgtacgctgcgcggtgatatcggcgatacctataactacatgcacgcgttttccgaaatgccgagcacattcagcgcactgcccgattacatccagtctttacagaaagatcacggctttttcctgctttccgcactcatcaagcttttgtgcggcgggcaggtgcgcgtttggttttgcattctcgccgcgcttcagctctggccgctcgttaaaaactatcggctttattcggaaagctactgcatcagtctgtttttgtttatcgcttccacggattacatctcctggatgatgaacggcatgcggcaatttttggcggcggcgctcgtgttcgcctgctgtccgcttttgctgcgcaagagatacggacaagccacgctcatcattttacttgccgccacactgcatgcctcggcactgttcgcactaccgtttgtttttctcacacgcggaaaagcatggaaccgaaaaacgcttttgtttcttctgctcactgttttggtcgtgcttttcatcgaccgcttcacaaacattttggagctgcttttgcaggaaacgcagtacaaaaatgtcgtcagcgattggaaaggctttgaggacaacggtacaaacctgctgcgcgtactggtctacgctgtgccgacgttgctttctttgatcggtttacggtttatccgtgcagaaaatgacccactcatcgacctttgcgtcaacatgtccattgtatcgaccggcatttacatcctctcagcgttcacaagcggcatttttgtcgggcggctgcccatatacttttcactttataactacattttgctgccatgggagctgcaccacatgttttcaaaacgctccgtgcgcattttaaccgtgatgatgctcattttttatctgtttttctatttctacgggctgaagaccttcggccttttataaaaggggggatccgttatgcttcgtgttttgcaggctgtcacctgcatggaccgcggcggactggaaacgatgctgatgaattactaccgtcacatagaccgcacacgcgtgcagttcgattttctgacgcaccgcgcacgggaaggcgcgtacgataaagagatttactctctcggcggcaaagttttcaccgtgccacggcaaaacccgttcagccccgcataccgccatgcactgcacaaatttttctccgcccacccggcgtatactgttgtgcacgcccatcttgattgtctttccggcgttgtactcggttgcgccaagcagcacggcgtgcctgtatgcattgctcacgcacacaccacaaatcagctgcgcgacttcaagtatccaataaaagatctgtataagcgcatcattccacgtaccgcgaccgatctgcttgcctgcggagaagatgccgggcgctggatgttcggcagtgcgccgtttttggtgctgccggtcgccatcgatacagaaaaattccgctttgataaaaacatgcgcgaagacatgcggcgcacactcggtatcacaaaagaagaacttctcatcgggcatgtggggcagtttcgcaaagagaaaaaccaagctttcctcttggatgtcctgcacagtctgcgcgcatgcggtacaaaatcgaagctgctgtttgttggcgacggtgaaaagcgggcagccgtacaaaaccgcgccgccgcactcggccttacaccgtatgtgctgtttttaggcgtgcgggaagatgttccggcacttttgcatgcaatggatgtattctgtatgccgtctctgtacgaaggcatgccgctctccgttttggaagcgcaggccgcagggctaccgtgccttgtctccaacggtgtaccgaaggattgtcttcaaacgccgcgtgcacggcagcttccgctttccgcaccgccttctaagtgggcggaggttattttggcagaaagtaaggtgctcagcgccgcgccgcctgtactacaaagctttgacatttgtgaaaacgcacatatgctcactgcgtattatctgcaaaaggatgcccaaaaaaggagggaaaccgcacatggttctgctgaccgtatttacgccgacgtataaccgcgcacacacgctgccggaagcatattgctcattaaaagcgcaaacatctaaaaacttcctatggctcatcgtagatgacggttccaccgaccgcaccgccgcgttggtctccgcctggatgcaggcggagaaagcattttccatccgttacctataccgtccaaacggcggcatgcacgctgcgcacaacaccgcttatgcgcacatcgagaccgagctgaacctttgccttgattccgacgaccgtttggcaaaggatgccgtagagcaaattgaaaagcgctgggcacagataaaaagcaagaattgcgccgggctcatcgggcttgatgacgacggaaacggcaagcttattggcaccggctttccgccgggcctcaccgaaacgacgctcagcggttactatgcgggcggcggcaaaggcgacaaaaagctcgtgtatcgtaccgacatcatccgaaaatacccgccgtacccggagtttccaaatgaaaaatacgtggcgctcgccgcaaaataccggctgatcgaccgcgattacaaactcgccgttttaaatcgcgtgctgtgccacgtgacgtatttagaagacggttcctcgcacaccatatggaagcaatacgcaaaaaacccgcgtggctttctatattggcggcagctttgccttacgtacccggctgctgcaacgcgcacggtactcgacagcatccattacgatgccgcgtgttttctcgcgaaagagcccgcactgatgctccgctcaccgaaaaaggtgcttacaatgctgtgcacgccgcttggcgcaggactttccgttttgatccgcctgatggccgcacgcaccgaacgcaaagcacaaaaggaggctgtatgatcccgaaaatcatccattactgctggtttggtcgcgcaccactgccggacaaagccaaaaagtgcatagagagttggcgcaagcactgcccgaactatacgattttggaatggaacgaagataattttgacattcaccaaaacggttacaccgaaatgtgctgtaaagagaaaaagtacgcgtttctcgccgattacgcccgcttgcagatcatcgaaaacgagggcggcttttactttgatgtagatgtcgagctcgtgcgcagtttggacccgctttgcagcgagcacgcgttttttgcctttgagaccgaccgtatgattgcgaccggcctcggcttcggcgcagaaaaacaccatccgctcgtgcacttcatgctggagcaatatgcacccctgctcgacggcaagcacggcgtcatcggctgcccgcagctcaatacacaggcgcttttaaaatgcggcttaaagccaaacggcaagcgacaaaccgtgcaaggcgcagccgtctttcccaaggcgtattttaacccctacgaggatgccacggggcggctttatatcacagactgcacctacaccgtgcactggtatgccaaaagctggatgaaccgccgtaccgtactgcgcagcaagctcacgcgcccgctgcatcgcctgctcgccgaccatccgcgtatcaaagaaaaagtgaaaggcggcgtttaaaacggaaccgaaaaaactgctttttattttgccgtctttagagattggcggggcagagcgcagccttatcggactgttggaagcgctcgaagacaaaagcgtgcaggcctccgtttttctgtaccgccgcgagggagaattcataaaagacctgccgcaatatgtgcgtctgctgccgggaatccctgcataccacgcctatacagagccgatcctgtcgcttgtaaaacatggcagactgcgatttgcagccgcacgattactcgcaaagctcgcgttttttttgtacggtactttcatgcgaaaacccaccggcacgtggacgcacttgcagtatatctctgcatttttgcagccgtttttgccgaatatcccgggcgagtatgatcttgccgcgcagtacctcggcgtcgccgatacgcttgtgcacaaggtaaacgccaagtacaaagtcgcgtggaaccacacggattacgccacacaacacccaaatccaaagctcgaccgccgtgtgtatacgaacgtagactatgttgtcagtgtttccgaaagctgcacggaagcctttcggcgcatgtatcccgcgttttcacaaaaagccgtcacggtcgaaaactgccttgcgcgcgagctcatcgagcgcaaatcgctgctgccggctgccggcatgtatcgcgaagcgggcgagaccgtgctgctttccgtcggtcggttttgtgaagcgaaaaactttgaagccattccgaaaatctgcacagtgcttttaaagcgcggcctttccgttaagtggtacattttaggctacggcgaccgggaaacccaaattcgcgaagccattcaagctgtgcatatggaagatttcgtcgtgctgctcggcaaaaaggagaatccgtacccctatatacgtatgtgcgacatttacgtgcagccgtccgtttatgagggcaaatgcgtcgccgtgcgggaggcgcagctgctcgggaagcctgtcatcatcacggatttttccaccgcgcacagccagctgcaagacggcacagacggcatgatcgcgccgcttgattttgacggttttacagatgctctcgccgcgctgattcaagataacgaaaaacaagaagcactcaaagccgcctgtcgcagcaccgatttcacacagtataaagaagcggagaaaatcctgagatttgcagaaggaagggaaagttatgccgaagatcagcgtcattgtgccgatctacaacgccgaaaaatatctcgagcggtgcgttaaaagcctcatcgcacagacctttcacgacattgaaatcttacttatcgatgacggctctaccgatgcaagctccatactgtgcacgcggctcaaaaaagaggacagccgcatacgcattttgcataagccaaacggcggcctcagcagtgcgcgaaacgcgggtctgcttgcggcaagcggagcattcatcggctttgtcgatgccgatgacaccgtatcgccgacattttttgaaacgctttttcagaagattgagcagtatcactgtgattttgttttctgcgacctcatacgcatagaatccggcaagccgcccacgctgcgctctgcatcgctccacggcgggtattacgacaaacgcaaaatcaaacgctgcgtatttccgcagctcatcatgcgcgacaatctcgaatacggcccgcttttatccgtgtgtgtttgtttataccgtacatcgtttttaaaagaatacgacctgcggttcgacgaaaccgtgcgatattccgaagataatctattcagcgcgtgtgcaggataccgcgccgcttcgttcttttatcttaagggccaagggctttacgagtaccaccgcaaccccggcagcatcaccacaacgcacaaagcagatgcgtgggaaagctacaaacgtatgcatcaaaagctgtgcgcactgtttcaaaactgcccggaatataatttcagccgtcaactcgatctgcatctcatccactacgcctgcgccgcactcggcggagcctgtgatttgccaaaggtcgaacaaaaatcggaaatcgaccgcattttaaacgacgaagcgctgaaacgtgcgctgcaaaaccgacccgcgcgacatattccgtttaaacttgccgtacagcttttgtgcatgcaataccgctgcacgccgcttatgtgcctgtggctgcaaaggagagagcactatgcctgaagtcagcatcattctgcccgtctataatgaggaaaggcatctgcaaaaaacgctttccgcgctgtgtacccaaacatttcgcgattttgagctgcttgccgtagacgatggctccaccgatgaaagccgccgcattttagaacgctttgcagctgcagacgcgcgtatcacggtactcgcgcaacaccatggcggcgtttcccgcgcacgtaacctcgctttggaagccgccaccggaaagtgggtgtggtttgtagacagcgacgacctgccgttttcgaactacctcgaaaaagcattgcatgagccgcagtcaaacgacgcagacattctcatgggcagctacctaaaaatggatttaaacggtgagattacccgcataacactaccaaaatacggtctcatagattccgaaacgcttcccgtttgcttcatgcaagcacagtacgaaaccgggtattttggctatctttggaacaagcttctgcgtcgcgagaaaattctttccgtcaacgctgtatttgatgaatccatgacgcttgctgaggatctgcaatttttagtacagctttaccgcgcaaacagccgcgtactcctcacgccacactgtgccatgcaatacgccgcgcacccgctgcgccgggaagcagaccactttaagcagctccttttgcaaaaagagattgcgcactgggtcatcacagagcaaaagcacacggaatttaagccgttttttcgcaaaagactcagtgcatacacggcattctccgttttttacgcgccggatatcgggcttgatcccatcacgaaagccaaagagattatggaagatgaagcgctttgcgcactgctttccgaagcggagcttcacggcgtttttcggtgcatcgtgcactgcttaaagcagcaaaatctgcccgcattgcagctgcaccttgccgcataccgcgccgcaaaacacgcaaaatcgattttgaaaggggagaatacgcgtgcgttacattctgcatgaccacatcggcagcgcaaaccacgggtgcgaagcgcttgtgcgcaccgtttctaagcttttaggccccggccgcacggtgctgctttccgaagcgccggaggaagatgccagatacggcgtagcgcgcccgctcgttgtgcaggatgtgcgccccgcgcgaagcgatgtgatccgcaaaagctcgcccgcattttggagcgcctatctgcgcttaaagcttttaaacgattacacaccgctcgatgtcttgccgtaccgtgccgcgctgcaaacgctcacgcgcgacgatattctcgtctctatcggcggcgatgtgtactgctacgaagatatgcaaaagcgcattcggctgcacaacctcgcacggcactatgcaggcggcagcatactgctcggctgttcgattgaaccgaagcttcttcgcagtaaggctctgctacgtgacctcaccgcatttgaccgcatcacagcgcgcgagacacaaacgctgcacgcgctgcaaagcgccgggctgcgaaacgtctccttttgcccggattccgctttcttgctggagccgcgcggtgcggagattccggaagtgtttcagccgcacaacaccgtcggtatcaatgtaagcccgcttttactgcgccgtgcacgaaacgcaaagcttattttgggtaacctcatcgcgctgattgacacaatcctgcgcacaacagacagtgccgtggcgctcatcccgcacgccgtgcaaaacggcaatgatgaccgcgatccgcttaaagaattatacgcggcctttcaaggcagcggccgcgtatgcctcatcaaagaccaaagtgcgtcgcagcttaaatcgattattgcgctgtgctcgtcgttcatcggcgcgcgcacacatgccgtcatcgcggcgtattcttccggcgtacccacgctcgcactcgggtattctgtaaaagccaagggccttgcagaagacattttcggtgtcgatacgccctatgtgctgcccattgaaaacattgcggatgaaactgccgtcacgcgcaggtggatacgcctacgcagccacgcgccggagatcaccgaaacgctgcgtgccaaaacggccgcctatgaagacgctttaaaagcgtttcgccgcactttgcaggagggaaaagatggaaaaaccgctcgtaacgctgcttctgccgtgttataactgtgaaaaaacacttgaccgcttcatgcgctccgtaataagcgaatcttaccacccgttggagctcatctgcattgatgacggttcgacagacgatacggcaaagctgctgaaaaacttcgagacgattttaaaagaaagcggcgtgcagtatactgtgttgacgcaggaaaacatagggcttggcggtgcgatacaaacggggttactccacgcgcacggtgattttctctgctgggcagatccggatgattttttattaccgggctctgttgaaaaacgcgctacgtatctgctgcagcacccggcgtgcggcgcggtgagcagtgacgccttcgtttttgacgagagcgacctcaaaatgccgctctaccgcgaggctgcgcggttttcgcaccgttttgaactcatgcagttttggtatcttctgcgcggcgaaggcatggtgtgcgccggctgtcacatgatccgcatgcgctgttttgatgaagccgtgccgaaccgcatgatctaccccgcgcggcgcgggcagaattatcagctcatgctgccggtgtgttacaaatttccgcacgcttttttagacgaaccgctttacggctatgtaaaatatcaaaacggcatgtctgcgggagatgtaaccgaaatcgacaagctgcgccgcatcgcagagcacgagacgatcttgcttcaaaccgctaagcagatcaaaatgccggaagccgagtaccaaaagtgcttagacgagatcgaaaagcgatacgccttgcagcgcttttacacggcaatcgattttcggaacaaagtgcttttgcaggaacaatatgccattttgaaaaagtacggtgccgtcacgcgcgatattaaaaagctctatcgacgaaaccgcactgtgctgcacaagctgtgctttaagttttatgaaggagggaagaactatgtgcaaaatttcggtgatcgtgcccgtttataacgcggaaggcaccctcgaaacggcacttagcagcgttttcatgcagacgctcacggatatagaaattctctgcatcaacgacggctccacagaccattccgcagacgttctaacgagcgcccagcgcagagacggccgcgtgcggtgccttacgcaggaaaacgccggcgcaggcatggcgcgcaataagggcatagcggaggcaaaaggggagtacattgcgtttctcgatgccgatgatctctatccgggcccgtatgcgctcgaaacgcttttggctgccgccgaaaaaagcggtgccatggtctgcggcggctcgattgaaaaagccaaggggaacgatgtgcaccccatgtttgttttcacggaggagggctttcataacgcctgcgatgagccgctcgaccgttttttcgcccgctttatttataatcgcaattttttgcttgaaaacaagctgcaatttccgccgctgcgtgtctatgaagatcccatttttcttctctgcacgcttttaaaagccaaagaatactacgccgtgcccgacgtggtttaccgctacaacggcacgcattccaataaacgtatcacgctcgcctgcaccaaggattatctgcgcgggctcatcgctgagctgaagctctcaaagaaaaaagacttgccggaaattcacacgctgtgctgcgaccgcctgatgcgtgaggcggatttttacgcccagcgctttttgaaaacggaagacccggagctgctcgcactattactcgaggcaaacgccgccgtttcgccgcagctgctcaaggacccgccggagaacggcagcgtcatcttgcccgctttgcgcaccatctggcacgcgggctgccgctatctgcgctggcgggatcagcgcatcatccgcacgctatgcgacgtgtttgtaaagtagccatgcgtgccaaaaggtgctttttcaatgccttttccgggcttttcagccagtttgtttccgtcgcactcggcgttatcattccgcggctcgtgctcgtgcagctcggttccgaagccaacggcctgctctccgctacacagcaggcgcttgtgtatcttgacctgcttgaaagcggtatcggcacggcagcgctgcaggcactttataaacccgccgccgaacaggacagagccgccgtcagcggtatcttcaatgcgattcgccgggaatatgccaaagtcggcatcgcttatgccgtactcgtttgcggactttcagtgctgtttccgtttttcatcaaaaccgaactaccgttttttaccgtattgctcacggttttgctcggcagcatgggacaagccgtgcgctttctgtttcaggcaaaataccgcgtgcttttgcaggcagagggcagaggatacgtgctcatcaacgccaacctgcttttaactgtttccatcagtatcggcaaaatcatactgctaatttgcggactttcgctcatcgccgtacagctgctctgctttttgtgcggcttactgcaaaccgtactgctcacactctacgccaaaaaacagtatagctggcttaaccgcgccgtgccgcccgatacaaccgccaccgcacagcaccgtgccgtgctcgtacaccagatctccgggctcatctttcaaaacaccgatgttttactgctctctgtcgtctgcggactgaaaacaacgagcgtctactccatgtacgtgatgcttttcggcatggtcggcacggcggtctccgccataaacggcagcgtgtcgttcgccctggggcaaacctatcacaccgaccgcgcgcattttttgcggctttaccgcgcatttgaaacatacaatatggcgctcacatttgcgctgtatctcacggcggatgtgttcattctgccgtttttgaagctctacaccgccggtgtgacggatatttcgtatctcgatcccgttttgccgcatctttttgtctgcacgtacctgctctcaaacggacgtgcagccgcgcagcgcgtcatcgaatacgccgggcattttcaaaaaacgcagaaccgttccgtcatcgaatccgtcatcaatcttctcatatcgcttttacttgtggtgccgcttggcatgtacggcgtgctcatcgggacgattgcagcgcttttatatcgcacgaacgatatgattttctacgcatcccacaagctgctgcatgcacctgcacggcgtacttaccgaaaattcctgtgcaacggggtattgttcgttctgttgtggttttccgcaaaagctctgccgcttccactcaactcatatcccgcgctgctcctatcagccgccgtattttgcatattcagccttttgctgtttaccgtgctcggctctgcgctggattgtgatgcccgccgcgttcttttcgacatctggcgcagaacggtaatgaccgttctgcaaaaagccaatacattcgccgcaaaataggggagaagcacattttcacacaccgttccgcgttatgaatctctgacgaaattgtttgctaatttcgctataaatcaaccattaaattcggcaaaataccaaaatttaattatcttctttgtatttaattgacctctttcgccttttttgatatactgttaagcgttaaatcttttggagaatattcggaagcaataaaacacaagtgattttgtaaggctatatgcttgcaaaatcaccaaatttcgagtatatctcagggcgaggaggatattctttattatggcaggaaagctctctgcatttttcggagcgcaggatatgacggtgggcaacccggcgacaaatctcattcggttttccacaccgcttctcatcggcaacttggcgcagcagctgtacagcacggtggactccattgtggtcggcaattatgtgggtgacagcgcgttggccgccatcggtgccagcggcccgatcatcaacctgctgcttgtactgttcatgggcgtatcggtcggtgccagcatcatggcatcgcagtgtttcggtgcaaaagacaaaaagcgactttcgcattctgcaggtacggcgatcacggcaacctttgcggtttccatcttcgtcatggtcgtgggcccgctcattacacacccgatcatgtctgcactgcaaacaccgcaggatatttacactatgtcgtgtgattatctcatcatcaatttcctcggtattctcggcagcgcatattacaacattatttccggcattctgcgcggcctcggcgattccgtcatgccgctcattttcctgctcgtggcatgcggcatgaacattggtctggatatctggtttgtcgcgggctttaaaatgggcgttgcgggcgctgcgtgggcaaccatcatctcgcaggcagtctccggcatcctgtgtcttgtgcgtctgctcttaatgcgtgacgtattgcacatcacgtggcgcaccctgtggccgacaaaagcgcttttgttccagctcatccgtttgggtctgcccagcggtctcacacaggcggtgttctcgctcgccatgctggtcgtgcagtcccttacaaacagcttcggtaccacgatcatcgcggtttccaccgttgttatgcgcgtggacggctttgccatgatgccgaacttcaccttcggtacggcaacgacgaccttcaccggccagaacatcggcgcaggtcgtttggatcgcgtggaaaagggcacaaaggacggcttaaagctcggcctttccgtttccgtggtacttgttgcgctgatcctgttcttcggccgttatctcatggaaatgtttacgagtacgccggacgtcattgataccggcatgcatatgatgcgcattctctccatcggttacattgcaatggccgtcacgcagatcctttccggcgttatgcgcggcgcgggcgatacgatgaccccaatgtggatctccctcatcacgaccatcgttatccgtgtgccgatcgcatacggcctcgcagcactgatgcactctgcagatgcgctgttcatctccctgctcataagctgggtcatgggtgccgtgcttacctccatcgcgttccgcatgggccgttggaagaagaagtccatcatcaacgacgatgtgcccgaaccggcagatgtgtaggtttaagccctattcgtatagaaaaatgagtagcttctttgtgtgcagacctatttttctctgatagaacaaaacagcaccgcgctaagaatgaactgcaccccatttgttagacaagtatgatatactatactaacagatggggtgcagttcactatccgcttgtcggaccgaacattaaagcgtttctctcgctcgtaaagaaattccccaaaacgcatttctacgcgcttgagaatgacctgaattgtctgcacgcgcttcaatccgaagtcgcaaaacgaaacgtcgtgctcggctggtttgggaattaaagtactcgtcgcggaaaaccatgtcatcacagagcattggacggtcgacgcgcgccgataaatatttgtacgtacaactcttgacattcgtactcttgtatgctatattgaacatacacacggcgatgcttatcgccgattttaagtggaggaatttttaaaatggcaaaactttccattcatactgacgaaaagaaaagcaagatcaaccgcaatatctacggcaatttttccgagcacctcggacgctgcatttataacggcatttatgttggcgaaaacagcgacattccaaacgtaaacggcatgcgaaccgatattgtggaagcgctgaaagctattaagctgccggtgctgcgctggccgggcggctgttttgcagatgaataccactggaaagacggcatcggccccaaggagacacgcaaaaagatggtcaacacgcactggggcggtgttgtggaggataacaccttcggcacgcacgaattcttagaattctgccgtcaggtcggctgcgagccgtacatcaacggcaacgtaggctccggcaccgtgcaggaaatgagcgagtggatggagtacatgacgtttgatggcatttcgcccatggcggacctgcgcgccaaaaacggtcatgccgagccgtggaaggtgaaatacttcggtgtcggcaatgaaaactggggctgcggcggcaatatgcgcccgtcctattatgccgacctctaccgccgcttccagacctacgtccgcgattacggcgacaaccacgtgttccgcattgcctgcggcccgggcatcgccgacgattacaactggacagaagaggtcatgcgcattgcgggcaactacatgaacggcctcagcctgcactattacaccgtgccgggcacatgggagaagaaaacagctgcaacaggctttgataccgacatgtattacgagactgttcgcaaggcattacacatggaagaacttatcacacgccacacggagatcatgagccattacgatcccgagcacaaagtcggtctgatcgtagacgagtggggtacatggtacgatgtggaaccgggcacgaatccgggcttcctgtatcagcagaataccatgcgcgacgccattgtcgccgctgtaacgctgaacattttcaatgcacacagtgaccgtgtcgtcatggcaaacatcgcacagcttgtaaacgttttgcagtccgtcatcctcaccgagggagagaaaatggtgcttacgccgacataccatgtattcgatctttataagcaccatcacgatgcaacgcttttgaatagccacctcgaaacggagggggtctacgccggcgtaccgaacctcacggtttccgcctcggaagacgaaaacggcgtcgtgcatatcacgctcgcgaacatttccgccgacaccgcgtacccgatcgactgtgcgctgaccggcaagaagtacaatacggcatctgcacgcattttgacaaactctatcggcgcatacaacgacttcgaccatcccgaagacgtcaagattacggatttcgacgcgctgacgcttgaaaacaacaacctgcacttcaatattccggcgtgtgccgtcatggaaatcacggtctcctgatggaacgcattccctgcaggcggtgtttgctgaaagacctcagcgacacagattattttcactcgatctacgaatatatcgaaaacattcccccggagcagaaagccccggatgcactttacaaagaccgtttgaaaaaatgcacatcatgcgaccacttagtcaacggcatgtgtgcgctgtgcggctgctttgtagaggtacgggcagcaaaagtgcgccaacattgcgcaaaaaacgcagaaatctggtaaaaatcggctctgatttttacttgtcaatccggcaaaattgtggtatactggctcgaagcctgtataccactttttgtgttttcgggcatcgcaatcccgtcgtttcgacgggctacctctaccttgaaaggatttatttatgctggatgtctttctcgacgcactcatcgattcgttaaaaacgctgccgtttctgtttgccgcgtactttctcattgagtatttagagcaccgtgcaagcagcaaaatggaacgcggtctgcaaaagctcggcaaattcggccccatcggcggcgcgctcctcggcgttgtgccgcagtgcggcttctccgtggcggcagcaaatttctacgccggacgcatcatcacagtcggcacactgctcgccgtgttcctttccacaagcgatgaagccctgccgattctgttctcacacccggagcagatgcggtacattttgccgatgctgctcatcaaagtcgcctccggcatcgtgttcggctttctggccgacctcattttacagcgctttttccaccctaaaaaagagaaaccgtttgaggagctgtgcgcggactgcgactgcgaccaccacagcctgttgcactccgccttgcaccacacgatcagcatttttctctttatcctcgtcgtaaacctcgtgctcggctatgccatttattttatcggggaagaccgcatttccggcttacttttaaacggcagcgtctttcagccgttcctgacggcactcattggactcattccgaactgtgcggcatccgtgatcttaacggagctgttcacgctgggcagcctgcaattcggctcctgcgtggcgggcttatgcgccggtgcaggcgtgggcctcgtcgtgctgttccgcacaaaccaccgcgtaaaagagaacctcgccatcgtcggtacgctgtacgcctgctccgtcgtgaccggcatgcttgtaaatttgattttctaaacttaaatatacgcaaaaacgaccgaaagcctttgcaccgcgctttcggtcgtttttgtttacatgtattcctcgatgaattccggtagagagggaattgccttctttcgaggtgaattttacaacacggcacccatgcagtgcgtatcggtgcagctctcaatgcgcacagagcgaatctcgcccgcaagggacgtaccgcttgccaccgcaacaggtgtatagttcatggagtatccctcccaaacgcctttttgaatctcacgctcgaaaagcacttcctccgtgcgaccgatttgcgctttaaaaaacgcctgctgcgttgcggtcgtcacgcggatcatctcgtggctgcgcgcttcctttacggcattcgtcagctgatcgcccatgtcataggcacgagtgccggggcggcgggaataggcaaacacgtgtactttcgcaaatgcgatctcttctgcaaacgccaaagattccgcaaattcttcatccgtttcgcccgcgaagccgaccatgatgtccgtcgtgatggcagcattttcaaacgctgcgcgcaggttgcgcacgatggtgcggtattcgtctgcggtgtagtggcggttcatgcgctttaaagtcgcatcgcagccgctttgcaaggagaggtggaactgcgggcacagctttttctgctttgccatgcgccggatcacgtcttccgaaagctgctccggctccaaggagccgaggcgcacacgctcaatacccggcgtagcgcaggccgcttcaatggcgtcacacagatgcagaccgaactcctgtccgtatgccgaaaggttgatgcccgtcagcaccacttctttgtagccgttcgcgccaagccccgcaagctccgccttgaggtcttcaagcggcttcgagcgcacacggccgcgggcataggggatgatgcagtatgagcaaaagcggttgcacccgtcttcaatcttcacaaatgcacgcgtgcggcctgtaaagttctccacattgagattctcaaatttttcgtcgttcgtgtgcggcgcaatgtcgatgatgcgctggcgtgcagaaagaaacgccagcagatccggcaccagacgcttgcggttcgaggtgccgaggataatatcggcttcctccagtcgccttgcgtcctccgggaacgcctgtgccatgcagcccgtcagcaccataacggcatccgggttatcttttttcgcgcggcgaaaaatctgccgcaccttgcggtcactttcggccgtgaccgtgcaggagttgaggattacgacgtccgctgtttccttgtcttccgctgcggcaaagccgtgctgcaaaagggaagagagcatcgcttccgattcatactggttcaccttgcagccgagggtgatgacctttgctttcatcatatattttaatttcctttcgtcacacgtcgttttcttccagccaaagcgtcagctccgtccagtcgttcatcagactgtccgcaagcgccttttgctcagtgatcttattcgtgatttccatcattttttcgtaatcgctcgccgtctcggggttggagagctgcccgttcagcgtgtcaatttccgcttccgccgcttcgatctcgcgctcgcatttcgaaagtgcggcatggcgcttccgaatttcagaggcacgctctttcttttgtttatagactgtattggctttcggcacagcgttttcattttccgcttcggcagcggcttttgcggcttcctgcttttgacgggcctcaagatatgcgtcgtagttgccgaggtacagcgttgtgccggaaggggtgagatagtagattttatccgcaagcttgttgataagataacggtcatgcgaaacgacgaacagcgtgccatcgtagcccagaagtgcgttttcaagcgcctcgcaggagccgatatcgaggtggttcgtcggttcgtcgaggatcaaaaggttcgctttggaaagcatcagctttaaaagcagcacgcgcgcacgctcgccgccggaaagccctttcacgggcttatacacgtcttcgcctttaaaaaggaacaccgccaatgcgctacgcacctgcgtctgcgtcatgtaggggtgcagatcccagatctcatcgatgaccgtcttactctcatctaaattgccttgcgcctgatcgtagtagccgatgtcgatattcgcgccaaagcggaaatcgccgaaggtttgcttataaatgtgcaacagcactttcagcaaagacgtttttccgcagccgttcgggccgatgaggaacaccttttcgccgcgtttgatatcgagattcacatttttaaagagcctgtggtcgccgaatgagagggcaagctcttccgcttccagaacatcattgccgccgcgctggctcgccttaaactgaaatttgatggtatccggatcatcctccggcttttcaagcgtcgcctgcaaacggtcaatggacttctgcttgctcgcaatcgtcacatagttgcgctcctgattgaaccgcttctgctgttcaatgatgccctcaatgcgcttgatctcacgctgggtgttatcgtagacgcgctgcatcgcaaggcggttttcttctttcagctgcaaatatttcgtataattgcccttatattctgtcaaatgcgtgttttcaatctcaaatgtgcggttcgtcacagcatcaaggaaataacggtcgtgcgaaataacgatgtacgacccgttgtaattcttcagaaaatcctccagccattcaacagacggaatatcaaggtggttcgtcggctcgtccagcaacagcaaattcgattcgccgagcagcatttttgcgagttgaattttcgctttctgtccgccgctcaaaacaccgataggagcataaatctgctccggcgcaaagccgaggccgatgagtgtgctttttgcacggttgcggcaggtgaggccgccgtctgcgatgaaacgatcgtttagctccgcctgcttttcgataagctcgttaaggttttccggcatttccgaaattttcgtcgtgagcacttctatctctgcttccattttgagcagcggcgcgaacaccgtcatcacttcgtcaaacgccggtttttccatatcgcggcaaacatgctgctccatgtagccgatggacgtttcgcgcgccggggtaaaggtgccttcgtccgccgtatattctccgttcagtaccttgaaaagcgtcgtctttccggaaccgttaatgcccacaaggccaatacggtcgcctttctgcacttcaaatgtaatatcctgaataatcacatcggtgccgaacatcttttttatgttgttcaccgtaagtattgccatagttgttctcctcggttcatattccgttttattataccgaaagatagccttcaaatcaagcaaaaaccgggacaaaatcacgccctgcgggcgaaaatcgcagagatttgacgtttctttccgattttaaggccaaaatagaaaaaagtatacggtttcgcttgattttcccccgaaaactgttgtataataacactactttaagagacagatttggtgtgttagaactttggagggttttccatgaaatgtccctattgcggatacagtgaaagtaaggtcatcgattccaggccaaccgatgagggggagcgcattcgccgccgccgtgagtgcttaaactgcgcaaaacgctttacgacctatgaagtcattgagactgtgccggtggtcgttgtaaaaaaagataaatcccgcgaggcttttgaccgcaacaagctgttgaacggccttctgcgcgcctgcgaaaaacgcccggtaccgcttgaaacactggagcgcatcgtagacgagattgaaacgctcctgcaaaactcgctcgaccgcgaagtgccgtccacgctcatcggcacttatgccatggataagctcaagaaggtcgatgaagtcgcctatgttcgctttgcttccgtttaccgtgaattcaaagacatcaatacgttcatggacgagctcaataagatcaaggccgagcgcaaccgataaattcagattatgtagcagcagtcccaacgcgatatggggctgctgttttttgctttaaaacacattttcaaatgcgatgcgctctgttttttgaatgtgctccgccgtgtttttcaccatctggcattcggcgcgcgctaaggacacctcctcctgctcaatataatagggcagcacggcaaaaatgttttccagcggctccaaatgctcgtgcggcaggaaaacgcacagtttatcgtgtattttctcccagtctgcctgcaattttcggctttcctccaaggctttttccgcttcgccgtcggaaagcagccggtcgatattttccgcggacacaatcagtgtattcgcagatcttgccgtgttgcagtaaccaaagatacacaccgccacagcaaataccgccaaaacgattgaaaaggtcatgcgcttcattttttcactcccttttttaggctgccgtcccgccgaatgagcgtataatggccggctgtgtttaccgttagaataaacacttcggaaagcggtacggcttcgctttttaatatgctgtgtatccactcttcatttttgccgcacaagtgcatagagcccacagaaaggtctccgtcgctcaccacaacgacttcaaggccctcgtctttcactttcacgcccatatcgctcggacgcaggtaatcgacggcggcttttttaacgacactcagcgtgccgttcgtctctacaatggcatatgccacatccgaaagcacaaaaatatccttttgccgcagttgctcaaaaaggtcttctacgctcatgcgcagctcctgcatgttttcctgaatgatacgcccatctttgatgatgacgaccggcttgccgcacaccaaacggtgaaaacggctgcttttaagcatgaaaaccgaaacgagcacctcgagcgcgatgagcaccaaaatggggatgagcccgctgaaaagcggctgtccgctgtcctgcatcgggatcgccgcaaggtctgagatgagcagcgtcacgaccaattcactcgtttgcagttgattgatctgccgtttgcccataacgcgaacggccaaaataatcataaaatacaagatgattgtgcgcacaaacgaaataaacatggcgttttcctttccgtatgtcttcgtcgctattatgcgtcttcgggcgtataaaatacggcctttctgtaaaatctacacaggagaaccatgcggaaaggaaactgctgatggaaaacttatctgaacacttaaaggaaaacgtaacatatataaatggattatttgaaaacgccatggattatatcgagcgcgaatttatggtcggcacggtaccggccgcgctgctcaccatggacgggctcgtcagcaagcagcacattactttgagcattttaaatccgttgatgcgcgcgaaaattccgacggataacggcaaagaaacacttttgtttatcgaagaaaacgtgctgtgcgccgtagagcaagccgagctttccaccgtcagcgaagtgcttgaacgcatgatgaacggctttgcggtgctgctgctcgataactgtccgacagcgctcgcgttcggcacgcagggctttgctgcgcgcggggtggatgagcccgatacggaagttatgcagcgcggctcccgcgaaggctttgtggaaacctaccagacaaacatttcgcttttacgacgccgtctcaaaacgaccgaactcaaatttgaaaagatgacaatcggtgaagagagccaaacaccggctgcgctgtgctatttaaaaaacatcgcggacccgaagatcattaacacactcaaaaagcggctttccgcatgtaatctaaaagacgtgctcgcagcaggatatttggcgggttacttggaacgtcccgcgatttttgatcgcgtaggttttaccgagcgccccgataccttatgcggcaaactgcatgaggggcgcatcgggttgcttatagacggcacgcccacagcgctttacgtgccgtatctcttcgttgaaaactttcagaccgccgacgattatgcaaaccgtccgttttacgccacgttcacgcgctggctgaaatacatcgcgtttttcctcgcgatttttctgccggggctgtatgtcggaatcgccgcacacgacccggagctgctgccggaaacactgctcgttaccattgcacaggcagagcgcagtacgccgtttcccgtcatgttagaagcgattttgctttactttatgtatgaactgatgcgcgaagccggactgcgcgtaccgaaaccgctcggcagctctgtcggcatcgtgggcggtcttgtcatcggcgagaccgccgtttccgcagggctcgtcagcgcaccgtcgctcgtcgtcatcgccgtcacggtcattaccgggtacacgattccgaaattatacgagcccatggctgtactgcgtcttacttttattttggtgggcggtatatggggtgtgtggggcgtgcttgcaggctttacgtttttattattcgagctttgcggcaaaacaagcttttccgtgccgtttttggccccggtcgcaccatttcggctttccgccatgcgggatgtgcttgtacgcgcgggatggaaacgattagtgcgtcataacgccttcgtacaacacatgcccggcgcgggaaagggggaaaagcacctgtgaaaaccaagatcagtgctttgcagctttaccttatgctgtttctttcacgtgtcatcgtcagcatcacaatcaatgtgcaaaccgtcggcggcagcaatttgattgaaagtattttctcttcgctcgggctgtttttgtaccttacggtgttttctctgccgcttttcgtgctgcacaaaagccacccggaagcatcgcttctgcaaatcgcagagaataactgcggccgcggtgtttctgtaccgatgtccgcaatttacgcgctttattttatagtgatgaacattttcagtctttcgctttttctgacgctgctcgtcaacactacagacccagtcgcttcgcgtttttccatcgtccttgtcgtgctcggcatcgcactttatggtgccattcgcggtatagaaaccatctcgcgcgcctcggtatgcattttcacgctgttcatgctcggcatggggatgatttttctcgccgtctcgccgaacgtcacgccgcattatctcatgccgcttttctatgacggcacagaccaaaccgtacaggggtttctcgtcttcacagcgcgctgttcttcgcttgccgagtttgccgttttgatgccgtttcttacaagtacggatacaaaaagcggtaaaagccaccgcgtgctcggctttgtcgtttggaacggcggcatcaccgtgtttttgggtgtgcttctgtttttcatcgtctcgtgtctcggcgagtacgccgcgctgcaagttttccccgcatacacgctcgcttccatcgcggagattgccggcattcagcggctggacgcgcttttcatcggcatcagcatgatggcgctcatcgtgcgtattgcctgcggattattctgcatcgccgtgtgcatgacacctatcccgacacgcccgcgcgcgtggctgacagcactcatagccgcgctgacagcagttctgtccctatggctcacagactccgccgcacgcgtcggggccgtgttccgcacagcgtatctgctgccgttttccgttttgaccggcgctatgctgccgagtttgctttggtttttcgactgcatcaaaaagaagaggagacgcgccgcatgaaaaaagcactcacatccgttttactttcgctcattttgacgctcaccgcttcgggctgcgcgccggagctttacgagcgcttgctcatcagcgcaatcggcgtagaccgcacggcaaccggctgccgcgtgacggtgctcgcttccgaaacgacggaggacggagggcagagcaccttttccggtgaaggcgataccgtccccgaagcgctcagtcaaatcgcgctcgaaagcggccgcacgccgctgtattcgcacaacgccgccatccttttcggtatgcaatgcgcagaaagcggtatcgccgaacaactggatttctttatccgccactacgattcccgcccgaccgccaaagttttcctcgcagaagataccgccgaaagcgtcctgttacaaagggatctcaccgccgaacgcttcatgcagctttcaaacggcgcaaaatacagcgaggccgcggcagacgtgaatttgctgcagcttgtaaacggtctttacggcgtaaacgccactgccgcgctgcccgttctgcgcgccgatgatttgcccacgcccgtcggcacagccgttctgcaaagctaccgcctgtgcgccgtgctcacgccggcggaaacacaggggcttagtgccttgcagggtacactttcgggcggcgaattcaccgtaaaagacgaagctttcggcacggtatcgcttaaagtccgcagcacaaacagcaacattatcttcacaggcacagcagaacagcccgagtttaccgccagaattcatgttatcgccgaagtttctgccgtcacaaataccgcaaagcacgtagggaacgaagcatttccgcgctttgagactgcccttgccaactgcactgaggaacgcctcgccgcttatctcaaaaacgcaaacggagccgatgccgcaggtctcagcgaagtcattttccgcaccgcgccaaatgtgtggcgtgaaatgggggaaagccgcgcagaaaagctctcaaaagccgaaattacctttcacgtcactgccgaagtacagcgcgtggaagaggaggatattccgtatttttagagcaacagctgcactttatagcaatcggccgccggagcgcataggaaaagcctgcaaatcgcacattatatcccatccttttttcgaatagaacattctatgcgccatgcaggcttttgttcgttacaaatttgattatttcttggcttttttttcgtcggacagcgccattaaaatgcgctgggcaaccgcttgtcgcgccgtagcttccgctgcaagcttcaacgccgctgcacgcaaggccgctgcgtcactttccgggtgcacgcccgctgccgtctcgtgcaaagcgccgctctgcgccgccgcaaagtctttataaagctgctctgcgtcttcatcgccggaaaacagcacggcaatatcctgaatggaaagcacctgcttcagcaagcccaccatcatcagcttagaaagatgctccttgctgtactttttgtgcacgggatgatccacaacgccgcttttcacgtaattattgatcatactgttcgtcaataaactctgcttttcatcgcgttcaaaaagagacagcgcttcacctgtaaacatcatcacctgatccatataaaggggaatagaggggagggcgctccaattcggcagtgcaaattcttcggcttcctgcagccatttaccgcaatcaaattcaaccttgctcattttcacaacgactccttttgtttttcataaacagtatacggcatttttcttcgcattgcaagcgcttttctttggctgttttattgtttttggaaaaaaatggtcaaaattccattatgggcttgacaaacctactcagtttttgtataattaataacagtcaagtcggctctgcgaaatgcacaaaaagaaatatgcttgacaaagtgtgttttgtgtgttataatatcacttgttctgaaatggagaggtgtccgagtggtttaaggagctagtcttgaaaactagtgatctcgtaagggaccaagagttcgaatctcttcctctccgccacatttttcttttattttcaccatggagaagtacccaagtggtgaaggggctcccctgctaagggagtaggtcgggtaaccggcgcatgggttcaaatcccatcttctccgccaaaagtccaccgtaattttgatagaattacggtggactttttctatgcccgaaaaccgcttaaaacaaggattttcgaccgtttcagcacataagcgaaccccgctgcagagcaattctgcggcggggttcgtgttttttgcgtggctgtacaagcagaaaatcaaatcccatcattcttccgccagatcggcaatcaacttgacgtcgctgacggccagcgcaagctgaagcttgttttccagcccggttttttgcagcatatttgacacatggaatttgaccgttgacatctcgcagcccatctctgccgcaatgcgcgtgtaagacagtccccgcagcagatgccgcagaaccttcagttccgtctttgtaaattccgtgctttttgccatgccgatctcaactgtcggaggtgcgtccggaaaaatatgttcaccctccagtgtttgccggacgacatccatcaagcgcttctgcgtcgagtccttgtaccacaggctgtcggccccggccttctttgcctcatccagaacggcgccgtcgatcagcgaagtcacaacaataattttactcttcggctgtatagctttaatctggcgaacagcaatcaacccgttctcacggttctctgtctgcacatccatcaaaatcagatcgacagaatttgtcctgcacatctcgactgcttgtttcgcgcccggaatggacgccgtgatccggtatccgtcctcggcgcgaaaatagctttccaacagactgcgaatcatggtctggtcttcaacgatcatcaccttcatatgctgcttcctccttttcctgcaaactgagcatcagcttaaagcgagggacgctctgaatctccattttgccgccggattcttctatgcgttgacgcagcatagaaaggcctccgccttctgtgatttttccctttggtgccgcaccgttgttggttagggagaccgctatgcaatccggcttttgccaaaagcacacatacagctctgttccgtcggcgtgacggacacagttcgatgcacattcgctgattgccagtgcaatcagtgcgcgcatacgctgcgttcgcggctcatctcctgccagcagaactctgacgccaagcttttccgctcgttcttttgcggcttccaacggttcggattgcgctctcatctgactggagcggtaaagcactgaaatggactgctcccacaacgctgcggttgcacgaatttccttctggtctgtgttttggagcagcacgcgccgcgtcgcgaggatgctgtgtccaatgtcatcgtgcacgcgcagcttcatggccagcgtttcttcttcccggatgatctccggcatctgcgcaagcagccgcctaagccgcttgtttgttttctccagcttcgcattttccgcttttagctggttctgcttctgaatcagctccgtaacgtctgcggcagtgatttgtgtatatcgggcacctgcttttgttgtgatctgctcctgcgcaaagcgcagcgctgttccgtccggaaagcggtaaatccaaaggtgcggatccagacagcacacacttgccggcggtgcctgcagggcgctttgcatctctgccagcgactgtataccgcctttttgcagccagttcgtaatggcaagcatccggcggttgatgagccgcaccacgccgtttttatcgaaaaagcaggccgcgatggggagactgtcaaaactttccttgatcctatccatgcgcctttacctcctcgatctttccagcttccgcgtcacatattgcagcccgtcctcatcctgctcccattccaaaccttgaaaatgcgcgcgcagcccgcagagcggctctgccgctgaaacacaaaaagacacttctacctgcgcaccgacatctatggagatcagcattgcacgaagggattccagttccgtttccacgacggcctcgaacaggtcgtagatctgcgtcgcctgttcgagggtaagctggtcttctcccttgacaattgccttacagtcggcgccataaacacagatattctcggaagattcattgaggcataaccgaagctcctgcacactgatcgcaccgcgctgtgcgccgacaaaaatcaggttgcttctgcgtttgatgtaggttccgataatgatgacctgcccgagcaaacgcctggcccggttttggtcctccgttttctgcaattcagccagcagatcccacagcatcgcgatctgccgatcaatctgcgcctccatcatatcatacaagcgattttgctccgtcagcttcaaccatcttgcatgctgtgcattctccgccgccaaaacgtcgccggtgtcatgcaactcatctcgtgtcaattccagtttcttttgaacctgactcagcgctgagatgtcctccttccagaatacccagccgcggcgcaacttatgccgtttcaaaagtgtatcgtcatccagatagacggtatcctgctgtatatgccttagcttactttgcggcaaagtcccctgcatggcggcagatacatatttggagcaaaacgcttgatcagtaatctgaacaggcaggctcgtcgcttcaaagagctcatcgtatccgagattggaatgaatcagtccgctttgaatgcagcattcaaggatgcttgcaaaaatcaggcactgtgacacggtcatatcgcccgcgagcacccagacccaatagacatttttggcatacatataagcatatgccagcgaaagcgcaaacggaaccagcggtaaccagcgaattctcctgctatgtgggatacgacagtttttcaccatcgaaagaaacgcaaaccctgcgcacagagtctcccagcccagcacgaagaaaaaaccgacctcataccgatactcccggtccgataaaatgccggacgggaaagaaaatacctgctgatgcagatcattggtcagaacgagcaaaagcagcagcaatgtcggaagatacagaagctttgtccatcgcggcagacgaaaatcctctcccttgcccagagactgggaaacgaagaccgacagcatggggataaacagcatcggaaaataatagaaataccacagcaggcgttctgcatccgtgttatcaatggaaaacttgattgagcgcagcagaatccacagcaccatcagtgccgaaatcgccagcatgtagtgccgcacctgcacctgtacgatgcgcgcccaaagagagtagcaccacacgctgaacaaaaacaaatagattgcgcttcgcaggtagctggcagccggagaatgaaaataataccggcttgcatagcggagccacatggcaaacgcaatgagcaccagcaagcccaaggcgtacaaaaggcttcttttcgtcgttttgctcatgccgcatgcccccaaaaaatcagtatatttatatggatagtatatcatgcggatagacaaaagacaacacgttttgtcctctttatacagagaactgttacaaaatttcgctttgcaacggaaaataattacaaatcctatccaattggcgggggcggaaatggaagataacggctaaaatatagatgaaggattcaaaggaagagaaaggcggtggaaaagcacagatgcgaagaattgtattggatatgaagggcggacttctgtcggaggcggtcatgcaatcactttcgggatgcgacccggatttccttatctaccgttcttcaaagccggaagaaacgctggcgttgtgccggacctgccgtgccaatgtgttggtgatggaggtcatccgacagggaatctggaagctgagtgagagactcaagatctgcagtgccgtaaagcaactcggttggacgtgtaaggttctgcttttggtggatgaggacgcggataaactgcttgcctccgaagtgcggcaggcggtaaaggatcagctggttgataactttatttatgcatcggtatcgccgacttacctcgcgggcgtaattgacacgctttgaaaggatgggtgagaaatgaaaaaactactgcgattgattctaatatttctggtatttgcgctcatggcggcgctgtccgcgattaccgcgcttgcgtgctcgccggaagacagtaatccggaacatcatgaaaacattatacagaccgatgaggaaaagccaacctgcctgatgggaggatactatgtactggaatgtaccgtctgtgggatgagatgcacttatcaaactgaccctgccatgcctcacagctttggaccgtgggaagttgttcagggtaaagaacctacctgtacacaatccggcacgaagcgagcgtattgcagtacatgcaacaagtggtatgaaatgcccgcgccgccaacggatcattattgggttattgataaccgcgtattcgcgacctgtactacttcaggatacacccgttttatctgtgatgactgcggtacggaaggagacaccgtcacaatgtctgcgctgggtcacaaattcggcgcatggtttaccacgacgcagcctacctgcatggcgaacggcatccaaaaacgtgagtgcacgcgctgcggtgcgacggagacaaaatcgattgccaagacggaccacaaattcggcgcatggtttactacgacgcagcccacctgcatggagaccggcatccaaaagcgggagtgtacacaatgcagtgtgacggagacaaaatcgattgccaaggcggatcacaaattcggcgcatggtttactacaacgcagcccacctggatggcaaacggcatccaaaagcgggagtgtacacaatgcagtgtgacggagacaaaatcgattgccaagacggaccacaaattcggtgcgtggttcaccacgacgcagcctacctgcatggagatcggcatccaaaagcgggagtgtacgcaatgcagtgtaacggagacaaaaccgattgccaagacggatcacaattgggacgccgggaaagtggtcgcacaaccgacaacaagccaagagggagttatgcaatggatatgcaatatgtgcggcacgatacgcacaaatccaattcccaagctcaaaccgggaacgactgcagctccgagcacaacaccgactccggcgcctacggctccaccacacacctccgccacagccacaccgaaggtttcgcctacggctccaccacgcacatccgccacagccacaccgaaggtttcgcctacggctccaccacgcacatccgccacagccacgccgaaggcctcgcccacggcgtcgcctaatgcagctgcctcggcctcaccgggtatttcgcctacggcttcacccggcgcatcaatttcggggacagcggatagcgacggaaagaatggcgataggggagaaaagagcggatttggtgagaacgctgtcggtaaagatgttcctcaaaagtacgaaaagaacaatgcgcagacagcagagcgcagcttctccgtgggaaaaatccttgttttcacacttgtgccaacacttttgattgttgctgccgtcgtttttctactcgtttggagaaagaaaaaaaggcaggtttaacggacattctttccggatagtgaagaggttagctcagcgtacagcgcgtcccgccaaggagcgaccgttcatgaaagattggcagattgataattctattacacattgggattaccgatatattccacaggtgtgattgatatactttagaaaggagtggttatgttgcaggttgtaattcagaaaattccggaaaatttgcaggaatttgaaattcttgccgctaaagggcggcagccggaacatatctgcgcactgtttctgtgtgcattggcgttgtttgacagggacaaagatgcaggcgttgctgcgatgaaccttctgcgcggtcctaagcccatgacaccgtatgactgtcagtttctgcgcgaccgattgcgcggcaaggtctatctgccgcttgcatattttgaaggcgcaacgccggaaaatgggtatcagccgtgcgtgccatacacgctgaacgtgctggcagaccccagacctcaggatatagagccgggctatatgcgcgtgtttcttaaaacgtccggcgcggattcaccgcgtcccatgaaattgcggcagaaggcttcgaccggcgaatggttcctctgggaatattccagtattctcagcggtatccgtattcccgcggcggaagatccgtgggcataataagtaaagaaagggagtacagaaaatgggactcattaaagcagcattgggtgcggccggcggcgtaatggccgaccaatggaaagagtatttttactgtgaatcaattccggaaaatgttatggcggtcaagggacagcggcgcgtttccggacgcagcagcaacacaaagggaagcgaaaacatcatctcgaacggttccgtcgttgcggtggcggacggacagtgtatgatcattgttgatcagggcaaggttgcggagctttgcgccgtgccgggtgagtttgtctatgacagctcgacggagccgacgatcttctccggtgagttgggaaccagcatcgtagatacgttcaagaatatcggtaaacgctttactttcggcggcgagccgcccaaagatcagcgtgtctactattttaacacgaaagagctcattggcaataagtacggcacgccctctccggtgccgttccgcgttgtcgaccagcgcgcgggcattgatattgacatcgccattcgttgcttcggcgagtacagttaccgaatcagtgacccgattctgttctacacgaacgtatgcggcaacgtcagtgaagactatacccgcgaccgtctggacggtcagctgaaaaccgagcttttgacggcgcttcagcctgcgtttgcgaagatttccgacatgggaatccgctattccgcgctacccggtcatacaatggaactggccgaggcattgaatgaagttttatccggaaaatggcgctgcctgcgtggacttgagatcgtttcctttggcgtttcgtcggtcaaggcgagcgaagaggatgagcagatgattaaggagctgcagcgtaatgcggcgtttatggatccgacgagagcggcagcctatcttgtcggtgcacaggcttccgcgatgcaatctgcggcgtcgaatcagaatgcaggccctgcaatggcgtttatgggcatgaacatggcaggtcaggcgggcggcatgaacgcgcagaatctctatcagatgggcgcacagcagcaagcagcgcagcctgctccggctccggcagctgctgaaggatggaactgttcgtgtggacagagcggtattaccggaaaattctgcccgaactgtggcagtaaaaagccggaaccaaagcctgccgccgaaagctggaattgtccgcagtgcggcgcgacggcaagcggaaaattctgcccggaatgcggcaccaaaaagccggaatcgcaggcaaacggctggacgtgtagctgcggtgcggtgaacaaaggaaagttttgcgctgaatgcggcaaaccaaaaccggccggtgttccgcagtacaaatgcgacaaatgcggctgggagccggctgacccgacacacccgcccaagttctgcccggaatgcggcgatccgtttgacgacggggatttgaagtgaaaaaagcatccataatcgctctgaccatcgcgtcggcggttgtgtttatcgcactggcgggcgtatcactgtatcggtattttgtcgatagccggattcaagatggaggtaggatggaaaacccggatacatacagagcaggaaaagatctggtggaatttgagtggcgacagaaccacaggaatttttacagctgcttttcactgaaattctaccgggagaaggatatgcctctgctgatcggccggtttccggaccgatccggcgacgagatgagagaaagcgaaacggatgcgttttccaacccaatcccttggcagcttacgtgggtgcaatggtttgaacttcagaatatgctggcagagtcggatctgcccgcgtaccgaaagccgtctccaaatgtccaggacgaaaccgacagcgaaatccgggtcatttggcgcaccgatgacgggaacgagattcaaaagctcagcggcagccatgcagaagcgctggagaccttggtgctgagtattgccgaagaagcttatgccacgtcaaaccttgaaacggagtaatgcgaggtatgccaaacggcagtcgtacattttgcgcagaatgcggggccaaacgccctgcgaaagaataaaaacaaaccatacgatttattgtaacaggaggatttaccatgaaaggacataaatttttgaaggttaccggaattctgatgatcattgccgcagtattttccatcattgcgggtgttcttgtcggtggactgggtgtattggcggcaggactcggtgcggaatccggtctgacatttccatattgggcggcgttgatcctgacgctggtcggaggaatttgccagatgattgccggaatcaaaggcattaagcacagtaagcgcagtgaaaaagcaggaaagctcatcgtgtggggcgcgattgtggccgtattcagcgtattgagcattgtgatgagtctggtcaacggcggcgagtttaatgtcgtaagcatcctgacaggaatagctattccggccttgtatatctacggtgcggtactcaattccaaggcagacacgcagtaaccgtataattcaagtagcatacacaaaggagtttgatacatatatgggactgtttgataaaaaatattgcgatatttgcggagaaaaaatagggttacttggcaaccgcaagcttgaaaacggcaatctctgcaaaaactgcgcccaaaagctttccccttggttctctgatcgacgcaacagcactgttgaggaaatcaaggcacagcttgattacagggaagaaaaccagaaaaaggtcgcggcattccacacaaccagaacgctcggcgcggacaccaaggtgcttcttgacgaggacgcgggaaaattcatggtgacacgtgccagaaatctcgtggaagccaacccggatgttttggattttgcagacgtgaccggctgtaatctcgacattgacgagagccgcacggagcttaagcgtgaggataaggacgggagggagattagctacaatcccccgcggtatgaatactcctatgatttctacatcaccatattcgtcaacaacgattactttgacgaaatacgcttcaagatcaattccggttccgtagatattacaccgccccccgcaatgcgaccgggaatgacgacccgatgcaatccggagactaacgttgagtaccgcaattgcaaaaagctcggcgaggaaatccggcaggttctgacgcaggtccgcaaggatgtgcgccagcagattgaacaggaggccgcacccaaaacggcagtcacctgtccctactgcggcgcaacgaccacaccggacgtgaacggctgttgtgaatattgcggtggcgcggtaagaggataaatatccatcaaatgataatgaaagaaagaaggacaaaataatgaaaaagtttgtagcattgcttctgattgtggttacgcttctaacactttctgcctgtggtagcaaggatgcgttagccggaacatggtccgccgaacttggcgcagacggtacgatcacatggacattcaacggaagcggcaaatgcaccatggaaaatgcttatatgaaacaggacggtacgtacaccattgaaggtgatcagcttacggtgacactggaggcatggagtgatccatctacttatacattctccgtagatggaaacagccttaccatgaatgagaattccggctacggcatcagcggcacctttacgaaaaaatagccgtgcagcttaccattaacactatccgccctctgaccttttagaaaggagaaaaaacgatgaataaccttacaggcagcatgaaagactctgcattcgctaccagtccccgtgaatttgatcttccctattctaccacactggaagaaatcatgcagaaactcaatgcgcgcagagcagcgttccagatgccattccagatcaaaggcggcgttcccggacagcgcatctcgtttgagaaagaaccaaatgtggacgttggcctctggctttacctcaaggatggcacacacattcggattcagccggtcattacggaggccaagatgtcggttggcggtatgcgcgttgataagaacagcgcactgcgcaagggcctcaagggtgcgacggtcggtcttgcaacggagcgtggcgcctatattgacaccgtaacggaaaccgtgaagaagattttgaacggtgaggcagtagaggactatgttgcgccggaggttccggtcgaaacgaaggactggatgaccacattcttgctttgcttcttccttggcggtcttggcgtccaccgctactatgtcggtaagattggcacaggcattctctacacgctgacggccggtctgttcggcatcggataccttgtcgactttatcaagattctctgcggtaagtttaccgacaaggacggaaaccttatccggcgcgaaaagaaataagaaaaaatgtctcaggtaggcacggctgctttttgccgggattatacgttgttttctgctaattggcagatttgtgcaaccctgaaggatattgggaggaaattatgaaacagacgaagaccaagcttctatgcctgattcttgcggcactgatgctgctcagcggcctcaccgcctgcggaaaggataaggaggggaaagactccaatttaatcaagctcggtgactatgagctgctctacaagggcgcatgcatcatggaagattcggacggaaacgacgcaatcgttctgacactggacttcacaaacaacagcaaggaaaacgcctcatatctctggagtgtcgatgagacggttatgcaaaacggtgtagagctggaagctgcatctattatcacggactatgagaaccttgaaaccgtagtgagcgatcagtttacggatgttgcgccgggtgcaacgctggaagtgcggacagccttcgtgctaaaagacacgaccagtgaagtcaaagcgacctttgaggaatttctcggcagcaaaaaaggtacaatcaccgttgacccggctacgctcagccgggaaacggtctccgatacgaaaccggagaccaccggtacgaccggagacacattgctcgattggtggaacggcgaatggtacggctggtggaagatgagcggttgctacggcgattatgaaagcatggaaggcgactggtgggatgtctgcggcgtcattgatttcgacaaggactacacaggcacaattgagctttgggatgaggactacacgagatccaaacctatggcttccgcgcaggtcagtctgagcgaagccggaaccggcgagcacggtacggtgatgtccgaaggtggctggtttacaaacgtaacactggagcatgccgattggatcgttgaccccggtcttttggactacgatgatatgatctggatcagcggcgactatgaagacggcgatgacgaattccactatgacatctatctgcgcccgtggggcctttattggaaagacatggaggaagatgcgtatccctatcggtataccgattggtatctgccgctgattgacgcaggcaagtctatgccggatgctatcggagaaggtgtttcggaggggaatgctccgaccaaccagacgaatgcggcagctcccggcggaaacggcatcgtgactgaggagcaggtgcaaaagggctacgtttggatgaacgaggtcaataataatatttttgatgctacttacgaggatattgttgcctacttcggtgtagaaggcgagtttgtcaaggaagagtacagcgaccacatgcagtcgaactaccgctactacaagtggatttcgagcgaagacagctcgcatttcatctacgttaacttccgtgaaaagactccgggcgtttatacggtgagtgcgtacaacaccagcggcttctccggcaacgaggccattgcgaagtatcttgacatcgtcaaagcggaggccgccgaggcgaacaaggcagcatccgcaaacgccgagatgaaggacttctccgtggaaatcgcccagtttgcaaaagacgatgttaaggtcaagatcatgacgaagatcccggtatccggctggtcgttcgatgatagtgggcgctgcctggtggaaaacgacgatcccacagcgtttggtgcgggcgccatccagtttgaggtgagggagaacattgaaaaatttgattcctacaaggacagcttcgaaaactacaaggatatcgaggaccgcgtgatcggcggcatcaccttccatggccgcacctacaaaagaatcggctatgattggatccagtatatcgcgcagcttgacgacggccgtgccctttccatcggccttcgggatatggactgtgtaccgggaacgatgccggatatcattctcaacaatatgacgttccaataaaaaacggctcccgctccaatttggagcgggagaatccggttattcgcgaaaaacggaggtaatgcggtgaagttcaaagcgctcctcatcgcagcaggtctgggtatgagcctgctcggtctgacctcctgcggtcaggtcgacggatgcacctatccgtacccggaaacatcggtcctttttgacgatttccacattacaaaaaccatttacagccaagggacgatgagactctattatcgcggcgtacagttcaaagacaatcccatccgctgctacgacacgaattttgaagatttgggcgatcagtttgactatacgttccgaaacggtgttctgaccgttcaggcggattttgccgaaaagatcagcgggctgacaatcgaggacagggcgcacgatatcatctatcgtctgcgttatctggactccccgcagtttgcatggctggcagacgtgttttggtacgatgaaggctggagcgaaacgggagaccgcgaagcgtattacagtgcggccgagctgcaagcggaagctgacagaaaagccgaaagccaaaaggaagcacaggaggtctttgcgttgctggaaggcacgtggattacggaggacggcctgcaaaaatatgagtttgtcgcaaatgaggacaaaagcggtatgaactgttgtactatgtggtggaacaacgagacacaagaatggtacagctggagcatttttgccgagtccgcgttccggacgaagagctttgactttgtttgcgatgcagactgcgtttacgacgaaattacagaaaaggctgaaaagctgattaccattatacttgtcaacagtgaccatacagcggctgatatgcgcatcttgtacgattcggaagaaaacgtcataaaggacacggatgcaatttatcacaaacagtgagtttgtgggacacatccggaaaatgcggttataactgtgttcggcactacggactgcgcttgcgggctgtaacgccaactgggaagtgaggaacttagatggcaacacaaatcacaaattatcaatgtcccgcctgcacgggaccactccattttgtaggagaatccggcaggctggagtgcgattactgcggctcaagcttcgatgtcgcagaaattgaagcgctctacgcggaaaaagaaacaaaagcagcggaagcagcgcagaagcaggaagaaacagaagcggctcaaaaatctgccgaagcggaaaaacaaaagaccgccgcaggcggctctgactgggacacttccggcctgaacgaggattggggcgcggacgcggctgacatgaaggcttacagctgcccgtcgtgcggtgcggagctgctctgcgacgcgacaactgcggctacgtcctgcccatactgcggaaatccgtcggtgcttccgggtcagttcgccggcgttttgaaacctgattttgtgcttccctttaagctgagcaaggaagatgccatcaaggcgctgaagaaacactatcgcaaaaagccgctgttgccgtcaacgttctccaagtccaatcatcttgaggaggtcaaaggcgtgtatgtacccttctggatgtatgacggtgcggccagcggaagcgtgcagttccatgctaccactgtacataaatacacctcgggagattatgaaatcacggagacaagccactacgatgtgcgccgcgccggttctattggctttgagaaaatcccggtggacgcgtcaagcaaaatgccggacgactacatggattccatcgaaccgtatgactatacagacttaaagccgttttccacggcgtatctgcccggatttttggcagacaaatatgatgtgagcgttgaaaacagccgggagcgggcagacaagcgctgcgcgggttcgctggtgtctgcgctggaaagcacggtttcgaattacaccacctgcaatgaaacgagccgagacatctgtttgaagcgcggcaaagtgcattacgcgttgcttcccgtctggatcttgaatacaaagtgggaaggaaaagatttcctttttgccatgaatggtcagacaggtaagttggtaggcaaccttcctgtcagcacgaagcgggttgtcggtttgtttgcagcaatcgcggcgtcactcagcgccatcggcgtgactgcgctgctgcttttggcacactagggagggcggaaaaatgaaagagagaatacgctgtctcctgctgacgtttataatcgcgcttgtattctgcgtgaatgtatccgcaaccgagcagacaggtgcacagctttattatgtgacggatgaggccggacttctcagcgaaaacgaaaatatgatgctggaaaagatggcggaaaccgtctcccaaaaatacggcatcggtgtatatatcgtaaccgtagaggattatcgtgacttccattctgaaggtgtctataaggcaacctataccatctatcacgaatacacgatgggcgaaggaccggaccgcgacgggatcatgctcctgctcagcatggatgatcgcgactgggcgatgttctgctacggctcacgctgcgagtatgcgttcaacagctatggtcagcagaaactggaaaaggtattccttgataacttcggtgaaaatgactggtacggcggctttgaggattacatcaaagaatgcagcgtctatctggaaaaagcagcctcaggaaagccggttcgagcgagtttgttttttccgatccttatcgtgatcggtctttccctactggcagcagccgtgatcgtctctgtgatatggcagaaaatggaaaatgtattgaaaaaagcaaccgctaacgcctatgtttccgcgggacttcagcttacagagcaaacagatcattttacccataagacgacctccagccggaagattgagcgcagctcttccggcggcgggagcagccacagcgaatccggcggaggcggttccggccgaagcggaaaattctgaaaggagtggctatgaaaacaacacccagacgcgtgttcgcgctattgctggcactggttctgttattgtcgctttgcgcctgtacgcagaagacgcaaacggagcctgacgaaccaaaaataaatactgcccacaaaaaaactccggaagaccaacagaaagaagctgtattacagagcgacgggaacgatttttcgtcacaggataagaccgtggacacaccgccggtgcaatacgcgttttcacaggaggcagagacatcgcttggatggttgcgggacaggattgactttccgacgacaatgtttggcgcggcgtatctcggctatgtcggcggtctgtttgatgagggtttcgaggcggctttccctgcgtggctgcaggaaaccaatgaggcaatgctcctcgaatacccctttatcgcagagatcaacgatgagcacatcatcggcagcgcggggcatctgtactgcattgtgccggtcgacgagaacgcgacggttgcaatcaaccgtgtgcagtggaacgaaaaaacacagaccaatgaggtcatagaggttctctaccggtcagagagcggcgaaccggtgctgctctttgcgaatcttgacggcattgcgcataaggccgacacccaggtctttatcaccgacaacagcgggaacacctgcgaatggtatccctcgcttgatgcgacgagccatcttgcaccgtgtacatcggaagccggtgattatctttcgttcgattttacggaatatgcctggtatgacgtcccatccgaatttgccggttggctttctgacggctggacaggcatgaccgcgcttggccttgccggatcgcagagtacaggcatgggctggatcacagaaaccatggtagaggaaaccggccgctatgcctatttctcgctgcgcttctatctcgaggatgagacggggggtacagtcgatctggagcggacatacgaagacagcgacgacattgaggagatgtggagcggtttctgggcgattcaaacgattccggacgggccaagctatgtgacgctcagtttatcgcttgtgggcggtaacagctatggtgtcacggacggcccggtgtatctgtgtgagaagtatcctctcctgatcagcccgagcggcacggaactgctggtcggcgcaggtgagagcggcatttgcctgccgttcatgtcgcaaagcacaacagcatgtgtgctgacacaggccgcaggatagaaagcatgcaggaagcaaactgctttgagatttgcattcacaaattttgtttggtagcaatctaccgtccaagtccatgtccggggcaataacctattcggctcacagtatcaatgtaagctaccgctcaagacacagcttccctcggagatcgccgctgccgcatttcggagttttaaagagcggtcttcttggaatacgaaggtcagaagagataaagtcaaaatgccggggctaatgtatcaataaacgatgtttttcaaatattttctgctttatgtccgtgctatgaagcgctgaaagcgaaagcggcgaagttcgacgcggtggaagaagcaggaaagaccgatctaaaaaaggcgcagggctgccgggatttccgagcgggctctgcgccttttttattttcagaaaaatagcaccccgggccgaaggatgggtgaccgcggggcgcttgacagatttacaattgaattatataaaaccgcaaaggaaatgtcaatagaaaattcgaaaaaatgtggatatttttcatgtttttaacctgcttttaacgtattcttttcttttacctttgcagaagtctattgcaaaccgacacgcagcgtggtacaatcgacttaaagaagtacgtggaggagattttgtcgtgaacatgaaaacaatcggttccgccgttgtaatcatcttggccgccatagtcgggctattcctcggcgctgccatgaacgacgggttaagcggctccatactgctcgcggtcatcgcagggttcgtctgtgtgatctatacgattgaaaacagtggcaagaagtaggggattttttatgattttacggtttaaacagcgctttttttcatggttcgacagctacgatatttacgatgagaacggcaacacggtgtatgtcgtcaaagggcagctctcctggggacactgcctgaaaatttttgacgcttacggcgaagagatcggcacggtaaaagaacgcatcttcacgttcatgccgaaattcgaaatgtattttaaaaaccaatatgtcggttgcatcagccgcgaatttgcactatttaagccgaaatacaacgtagaatgcaacggctggcatgtggagggcaacgttttggagtgggattataccgttgtttccggaagcggtcacgatgtggcaagcatctccaaagagctgttcaactggacggacacgtaccttttgaacatatacgaccccgcagacgcactgtgcgttttgatgatcgtgcttgcaatcgacgccgaaaagtgcagccgaaataacggctaaacgctattttctgtacagaaaagacctccgctcaagactgtttggcccgagcagaggtcttttcttttcccaaaatttaaaatgcgtagaacaaaatgccgagaccggcggaaagcacgatcatcaaaatgggcgagggtgctttctttttaaagtgcttatagccaaagtgcaaagtaatcagcagcagcaaaatcacaacaccgcgcagatcgacctcgggggcgcttcgtatggtcgtaaagccgaatagcgtgctgagacccatcgtcagcgccgtagccaaaatgagcgccaccacgcacggacgcacgccggagaggaatgcctgtacaccggcgtatttcagcagattactcaacactgccgcaatgagcaaaataatgacgaacgaggggagcaccacgcccaaagtcgcgagcagactgcccaacacgccgccttgcgaagatccgatgaacgtcgccatgttgacggcaagtgggccgggggtcgattcggacaccgcaatgaagttgatgaactcgctttccgtgagccagtgattcgagagcacggcttcgcggatgagggagatcatgccgtagccgccaccgaacgacactgcgccaatctcaaggaaggtcaggaataatttaaaatagatcatttcacgtcaccgccttttccacgcaggcgctgtatgaagtaggccgcaagaccaaccacaccgctaagcaaaataaagtagatggacgaaaacgaaacagcgaaaacggaaaacgctatcatacaaaccgctacgcctgtgacaagcacggtattgaacgccgtcttttcaagacttttcagcatgcgcacaccggcggaaaagatgagatacacaacgcacacctgaattccgcggaacgcgcaggaaacgaatttcaagctcaaaaactggtcaaagaatagggaaatgaggtagatgatgacaaacgaagggatacacaccccaagcgtggccgtcgccgcgccgggcacaccggcaatgtgataaccgatatacgttgcgctgttaatcgctatcgggcccggcgtagattccgcaatcgcgatcatgtcgaggaactcttttttatcgatccactttttctttgcgataaattcattttccagcaaggcaaccatcgcatagccaccgccgaacgtgaaagcgccgatcttcaaaaatgtgaggaacagcgtgcatagttttttcatttttcaaccccattttctgctgatttaaacacgataatcatacaccgtttcaccgaaaaaagcaataaaaaagaagcaggcgcacctttcgatgtgttcctgcttcctttgctttattttaaattacttagagaagaggtttgccacacggttccagaagctgtctttggtttcagtcttggtcgtggtttcttccgtggtgctcgtgctgttgctgctcgagtccgttgcggtgcgcattacgtagcttacggtcatatccgtaccgtctgcgcggccggagcccttgaagctgtccgtacgatccttcatgatgtcaatcacgcgtgccagcatggaattcgggtcggtaatttcgctgaagccgtcgagcttatcgttgattgtaccggagaactctgtcatgccgtcgctaagctcagacgtgccgtccttgagctctgcgccgccggactggaactgaccgatcgcattcgatacggtcttgctggaggaagagagcgtctccatgccgccgagcagttggttggtgcctgcatcgagcgtgcctacgccggttgcgaatgcagaggtgccggttgcaagctgagaagcaccgctgccaagctttgcagcaccgtcggaaatcgcgttggccgcaccgacaaccgtgttggtatctgccggattctctgcgttatacagcgcgccggtcagcgtatcaacactgtccatcatttcgcctgcctgcgaggagaggtctttgaattcacccatcaaactcttgagctcatcggtgttaatgtccggaattgccgctgcaacctgctgcacagcgctctgttttgccgccgcaagtttctcggaagacgttactttttccgtaacagccggggcaacctgttcagcaaccttcgggccgacggccgatgcgatggcgttgggatcgatgtcggaagcaatcttttcaaccatgccagaaacctgcgcggttccgttactgatgacttcggcgctcggggtagaggtagaatcctgtgcaagagcatttaaaatagcctttttctgcgcgtcatcgaggccaagttcatttaaagccatctccacacaagtttttgaagcctgataacctgcggagtaaccgctctgataaagctgcgtcgtgagggctgcggctgcatttgtgacatcttcagaggaagaagccgcctgcacgttacccttgatctcttccgccgtcttctgggaagcaactgttgccgcattgcttgcagcagcttcggaagccgctttcgctgcgccgctcgccgcgccatcgaaaacctgttcagcgcctgcgccgagctgtgctttgagtgctgtcatatccgggatttcaacggcctccagcttgccggaaagctcggtcattttatcttcaagcgcggtcttcttttcggaagcctctacaaggcccgggacaagctgctgattcatgacgcccgcaagctgtgcggtactgttctgcagctgaatagcgccgagggaaagctcgccggtcttcgttgccaagagttgtgcgttttcaagcaggttttccgtgccgtttgcaagggtctgtgtgccgttcaaagcgctgtccacgccggcatcgaactgactgtaactcgaagcaaacgtgtcaaggctttcgacaagtgtgcccacagcgtcatccagtgcgccggaaccatccttcagctgatcgattgcatcggtcaactcattcatcgtgtctccaagctcgtcggaagcctcatcgaggtcgaggtcggaaaggttcggagccgcggcgaagagaaacgtcgggacggtgcagtccgtaacatccgcttcgagggtaagggtatcgagcatcaggtcgtcgagcttatcaaagctgtcggggagcaggtcgctgacggcttccttcatgcccggcatcgcaaggtagcaggcaacctgtgttttggaatcagactccacaagaccgtgctctgtcgtgatgttcttgaagttttcgctcggcagcacagccgccgcaacggtaaagaacggggtatagacggtgcgctttttaccgtttacggtcacttcttcgccggtgttgttcgtcagcttaacggttgcgacaaggtggccgctctgacccttgagttcatcggccgtaaccgccttgccgtccagcgtatactcgatggaaacgccgaccggcgcctgtgcgctgttcttgccctgataataaatatcggtttcgtccgtcgtccacttgagcgtattgccggactgttccggcatcacgtcgctcttgaggttctggatatcggaaaggccgctttcgtcggtaacggaatcaaaaccgtcatcgctgtgcagccaatcgctggtgatctgctcctgcacggaaccgtctgcgttcaggatgagataagaggtttcttttttctcaacggcagcatccgccgcgaaggccggggcagcgcagccgaggaggagaagtgcggaaatcgtagccgcaacggattttgtaagatacttactcatattgatcgagatcctttctctgaatcgattatgcctttttctcggtgatttcgggctttttcagccaatggaacgtggtctttctgaggattggctccgtgatgacaagcagtgccggcaacacaagcaggataactgccatactgatgagtgcgccgcgactgatgagcttgcacagcacgccgatgagttccatacgggagacgagggacacgctgaacgttgccgcgaagaaggtgagaccgcttgttaaaatactctgactgcactgttcaacggcaatttgagccgcttcctttgcagtgtggcccgcgttacgctcttcacggaaacgcgtggtcatgaggatcgcatagtcgaccgttgcaccgagctgaatggtgccgataacgatgcttgtgataaacggcagcgttgtgccggtgaagtacggaataccgaggttgatcatgatggcgctttcaatcgccgcaacgagcagcaccggaacagaagcggagcggaacacgatggcgatgatcacgaacacgacgatgatacttgtgatgttgacgttattgaagtcgacatccgcaacctcgatcaaatctttcgtcatcgcgccttcgccggtgatgacgccgttcgggtcgtactttttcacaatatcgatcatttcggagagctggttattttgctcgtcactgccgctcttataagaggagtttgcaaggatcatcttgtggccgccggcctcgaagatgtcgcgcacgtcgtcaggaataaacatttccgggatcgcgccgccgacgaacttttcatagctcaaaacctggtgaatgccgtccacgtcgctcaactcatcggaaagatcggagagatttttttcggaaagggtatcgtccacaatgatgaagtgggacgttgtcatatcgaagtcttccttcaagcggttcgtacccgcaatgccgggaaggtcctgcggaagcgcatcaaagatcgtgtagtaaacggaagtctttgactgtgcaatgaagaacggaataaagattatgataaacgcaatcaaaatcggcacacggtgcttcacaacgaagttcgaggtacgcttgagcttcgggatgaacgtgcggtgcgtgtgcttttcaatggcacgacggaacgtcatgataagggacggtaaaaccgtgatggtgcagataacgccgagcagaacaccctttgccatgacgacgccgatgtcttcgccgagcgtaagctgcatggtgcacatggcaaggaagcctgcaatcgttgtaagggagctgccggtaatggaggaaaacgtctttttaatagccgccaccatggcgtcctcatcggatgccgccgtcagcttttcttcttcgtaacggtgcagcaggaagatggagaagtccatcgtaacaccaagctgcaggaccgttgccaatgcttccgtaatgtagctgatttggccgaggaaaatgttcgtgccgaagttatagacgattgggaacagcatgccgagcatgaagataagcggcacaatcgtttctttcaggctgaggaacagaatcagcaacgaagcgcccacagcgcaaaggatatacaagggcatttctttattgatgaggctcttggtatcttccaaaatagccgacataccaccgatgaagcaatctttattcaagatgttcttgatttgcttctgcgcgttcatcgttctggcatctgcgctcggggcatcgaactgaacgatgagcatcgttgcgccggaatcgttatagaagaacttctgaatatcgctcggaagcatttccttcggcgtcgtcacatcgataaaatcgctcgtccacatgaccttctgtacgccttcgaccccttcaagatcgcttttcagttttaaggtatcaggcgtagacatgttttcaaccgtaatcatggaaaccgatgccatattgaagtcatcctccaaatacgtctcgccgatcatggaatccagatttttcggcaggtaggtcaaaatatcgtagttaatgtaggtgccgagcgcaccgaacaccgaggggatcaaaagcagaaccgctaaaacaagaatcagctttctgcgcttcacgatccatcgtgcaaagtgctccatttagcaccgctcctttcattcgggaaccatcccgtttatttcgttatgtagtttagtccaaaaatgaccaatagtcaatattaaaagtgacgaactgtgtaggcaaaataaattgactattagtcattttattcaaatctgtacaaaatgttgtttttggcttgctttttacggtgtatccgccttatactataaaacaaatgaagtgattacacagttagatttgaatgttgggaggccacagccatgcgcggcggtgttgaacagaaaaaagaacagaaaaaggaggggctgctcgaggcggcctatcagcttttccttgaaaagggcgttaacaagacctcggtcgatgagatcgtaaagaaagcgaacgtcgcaaagggtacgttttatctgtattttcacgataaaacccagcttctgcagcagctcacataccgcatttctgcgcgtgttttgagtgaggcctatgaatatgcggaagagcataagactggcgtttttgtagaagacatcatcctcatggtcgattacatcgtggaatactttaaaagaagccgtctgacactgcggcttttggagcgcaatttctcctggccgatgattgaaaagcagcttgatctaagagaagacccgttgtgggacaagcttgtcactgccattgagagcagctcgctcgccgtgggctgcacagaagatgtcttatataagcgcgtgtttttggtggttgagctcattggttccacttgctttgccacgatgattgaaaataagccggatacaatagacaatatgaaacccgtgctttacgacatggtgcgtaagatgcttgcgtaatgtaaagcgtatcgactttgcaaagttgagttgctttgtaaagtcatattaacttacacataaacctctcggggctgatttaaagctcgtcccgggaattttctatgttcgattgaacttttttgcaagatatagtaaaatagaaaccgaaaaacgagaagacacagaaccaacagaacggagatcatttgaacctatggataaatcggaaattcttgcactgcgccgtgcggtgctggaaaaagactttgcacgcatgaatgaccgccaaaagcaggccgtgttcaccgtaaacggcccgctgctcattttagcgggcgcaggcagcggaaaaacaacggtgctcatcaaccgcatcgcgaatatcctacgctacggcgacgcgtacaacagcacctatctgcatgacgatctcgatgaaaatgatattgccgcgtgcaaagcttatattgaaaacggcacgccgctcacaacggaaacacaggagcatttgagtgtttctgcctgcgcgccgtggcgcatcatggctattacctttacaaataaggctgcaggcgagctgaaagaccgcctgtgtgccatgctgggcgagaccgccaacgacatttgggcatcgacgttccactccacctgcgcgcgtattttgcgccgtgacggcgagcgcatcgggtattcctcgcactttacggtgtacgataccgacgaccagcgccgcttgatgaaaaacatcttaaaagagctcgatatttcggaaaaaaacatcacgccaaaatcgattttgaacgagatttcccgggcaaaggattctttaatctcgcctgctgagtacgccctcacggtcggcgacgatttcagattaaagattatctcccgcgcgtatacaacgtaccaaaagcgtttggaagacgccgatgctatggactttgacgacctcatcaacaaaatagtggagctcttcaaaaagtgcccggacgttctggaatactaccagaaccgtttccgctacctaatggttgacgagtatcaggacacaaaccatgcgcagtacacatttgtgcgcatgctggccgaaaaaagcggtaacctctgcgtggtcggcgacgacgaccagagcatctacaaattccgcggtgcgacgatcgaaaacattctaagctttgaaaatacgtttcagaatgcgacggtcattcgtttggagcagaattatcgctcgacgcagaacattttggacgctgcgaacgccgtcattgagcataacaccgagcgaaaaggcaaaacgctgtggacgcagaacggcaccggcgccatgatccacctgcacacggcggaaaacgaaacggacgaagccgagcgtatcacgaagatcatcttagacggcgttgctgcggggcggaaattctccgattacgctgttttgtaccgcatgaactcacagtcgctgacatttgaacgcaattttgcaaaatccggcgtaccgcatagaattataggcggcacgcgcttctacgagcgccgtgagatccgcgagatgatcgcatatttgagcgttatcaacaatccgagtgatgaaatgcgcctgcgccgcatcatcaacacgccgaagcgcagcattggcgaccgctcggtcgaagtcgcggcgcagatcggtcagcagacgggtgagacactgtttgaggtcgtctcgcacgcgaaaggctatcccgcactgtcccgtgccgcaaacaaaatgacgcttttcgccgcacagatgcagggactcatcgagctcaacaacgacgaaaaagtcacgctcggcgagctttatgacgagcttgtggagcgcatcgattacctgaattttcttaagaccgacgacccggaatccgcagaagaccgcgccgcgaacgtgcaggagcttgcttccaacctacgccgttttgaggaggaaaacccagaaggcacgctttcggattttctcgaagaagtttcgctcatcacggacatcgataattacgataataacgccgattccgtcgtgctcatgacggtgcactccgcaaaaggtctcgaattcccggtggtgttcctgccgggcatggaggaaaacattttcccgggcatggcgagcgtatatgtaccgtccgaagtggaggaggaacgccgtttagcgtatgttgccatcacgcgcgcaaaagaggagctgtacattttccacgcggaatcccgcatgatcttcggcatgacgaaccgcaaccgcgtttcacgctttgtggaagaaatcccggaaacgctcgtcgagcacacccgctcccgcgattacagcgcgcgcccggtctctatgccgaacttcggcggcgcgaagccgttcggggaagcaccgaaaacaaaatctgttgcggaagccggcggattcacgccgaagccgcgcgtaaagcccgcgcctgccggtacataccgcgtaggcgatactgtcctgcacaaggcgttcggcacgggtctcatcgtttccgccacgccgatggcgaacgatacgctgctcgaagtcgcgtttgacaaagtcggcaccaaaaagctgtttgcaaacttcgcaagactgacaaaagtataaaaagagtaagccgtgcacccgttttcaaagtgcacggcttatattattcaaatgcggttctaattttgtctgccgcagccacagccgcagtcgctcgctttcggcgggaaaaattcgtcggtcgggaaatcaatcttgcggaacagctcgcagggattgtcgccagaggtgacgcattccttatccggaatgcagaaatcaaacgcgggaatgagcatctgcacattccgcacaatctgcacgatggtaaacaggccgatcgtcacgtatacggtgtttttctgctctaccgtttcaaacgcgccgccgtaacggcttgcaatgcagtccgggatcacgcagcagggctcgcagccgcagcggcagtgctcgcaaagctttgcggaaagcgccaccggctgtgcgacctgcacagtcgccttgggtaagaccttattgccctgtaaatcggcttcgtcacggcagctctcgcttgtaaacatcttcacgttgccctcactgccgtagagaatgaccttcttattgaaaattgaaataccgcttacgcgttcgcagcccactgtcgcgccgccgtacagctccaaagatacgtcaaagaaaaacgtgagatcaatggaataatacccgcggttaaaggggatcggctgcatatcaatgtacacagagattacatcaacgtcccgcacccgcacattagcggaagcgtccacaacgggctgcaccgaggcgggaaacagcacacgtaaatcctctaagcagtctttatctgaacaggaatcgtaaatgcgcatggcatctatgcagacggcttcttttaacgctgcgccgttttcgcaatcgggtgtccgctcattttcagccatatttgtaaacctcctttgtggtttctcaatgccattgtacgaaaaagggcgggtattgtgcctgtcccgccgctttgctcggttttttcgcattgtaagaaatttttcggttgtatatttcgccgcagtttgctataatgaataggaatgtaccgcgctgcggtgcaaaaagtcggcaaaggccggcaaatttacgcagaaagcagtaaatgaaacttatggcattgattgtaattgaaggtctggacggcagcggcaaaggcacgcaggcaaagcttttgtatgattacgccttatcgcgcggccgcgcacggcaggtaacgttcccggattatgactctccgtcttcgtcgcttgtaaaaatgtatctgaaaggcgatttcggaaaagaggcgggagacgtgaacgcctacgccgcaagcgcattttacgccgtggatcgctttgcaagctaccgcatgaagtggaaagacgattatgcaagcggtgtgccgatcatctccgaccgctacgtgacgtccaacattgtatatcaattaagtaagctgccgaaaacggagtggaaagcgttcgtttcgtggcttgaagacctggaatatgaaaaattcgggctgccgaggccggatcgtgtgatttatctggatgtgccgccgaaaatttcccaaaggctgctcacagagcgctacgcaggcgacaccaccaaaaaagacattcacgaaagcgacatacattatctgctacattgcagggactgtgcactgtacgccgcagagcatttaaactggaccgtattaaactgcgccgagggcgacaccttgcgcagcattgaagatattcatcacgagatcaaggaaaagctggaggatttattatgatctatgtatttcttgcaaacggatttgaagagattgaagcgctcgcgcccgtggatattctgcgccgcgcagagcttgaagtaaagatcgtcggcgtcggcggcaaaacaatcaccggctcccacggcatcaccgtaacagctgacatcgaagaaaaagacgttacaacggacgatatggagctgatgatcctgcccggcggcatgcccggcacactgaacctcgaaaaatcgccgatcgtcacaacctgcgcggaatactgcgcaaagaacgacatttaccttgcggcaatctgcgctgcaccgagcgttctcggccatctcggcctcctgaacggtaaggaagccatctgcttcccgggctttgaaggcgaattaaagggcgccacaatctccgaaaagccggtctgcgtagacggcaagatcgtcacggcaaaaggcatgggcgttgccgtgcagtttggcttgacgcttgctggtctcatggtcggcaaggacgttgaaaagaagatccacgacggcattcagtgcacggattgatgaccgatacaaccgaaaaaaacgcactgcgccgaaaaatgtgtgcggcacgcaaagcctgcacggatcgtgctacacgggataactgccttttgcagcggctcatggcactttcggtgtaccaaaaggcatcgtgcgttttgagctacgtaagcttcggcacggaagcggatacgctcagaattctcgatcgtgtacttgcagacggcaaagcgctttacgtaccgaaatgcgtaccaaacacgaaccgcatggtgttttaccgcatctcggctttacgcgatctttcgccgggcgcttacggcattttggagccgaaagaagcagaggtttatcaagatgaagcaagtgcgctgtgccttgtgccgggactggcgttttcagcgaacggcgcacggctcgggtacggcaaagggtactacgatacgttttttgcgcagcacccggttttaaagctcggtctatgctacgattttcagctcgtgccgcaagtgccgacgcagccgcacgatgtgcgcatggacggtattttgaccgacaagcggctcgttttgacggcagatgaagaaaggatggaatgaaaatatgagtgataacggcaggcgctatgccccgaaggacgcgacaccgcgcagccagaattcgcgcgaattcaagctgaatctttccgaagatcagctcaatcacacagacgaactggaggacttgcagggctatgctggcagccgcgcaccacagcgtgtggaagaaagctctgccggtgcacgctccgcccgcgcggaacgcaatcagaaaaaggaagcgaaggagcacaagaaaagaaaccgtgtaaaggccagaaaaaacaagcgcattttcgcgttcacgtggcttgccatggttattctggtctctctgacccttgcttcgtacctgattggcggctccaacgattttcttggtgtagaccgcatggattccgaagtggaggtcacgattcccgaaaacgtgacgcaggagcagctgacagacattctttacaagagccacgcgatcgataaaccggagtttttctcccttttctgcaaattcaccacggaaatggagtattttgaacccggcacgtatacgatcaaaacaaactacgattataagcagcttgtcaataccttacagtccggtccggatctcggcgaagagatcaccgtcatgttccgtgagggcatcacggtgcagcagcttgccgctttgctggaagaaaacggcctgcacactgcagacgagatccttgaagcttgcaactcttcgaattacgacagctactcggatgttgcagccatcacgaacacaagtgaccgctactataagctcgagggctatctgttcccggatacgtaccagttctttgaaaacgatacggtagaatcgatccttgaccgcttcctcaataactttgaaaataagctcaccgacgaaatgcgcgatgacattgcgaaatccggctataccacggatcagatcatcacgctcgcttccatcattcaggcagaggctgcagatacaaaagatatgtataaagtttccgctgttttgcacaaccgactggaaagcggcgcagagcatgacatctacacgctggactgcgactccacagtttattatccgtacaaaacggcaaatgacgcgccggagggctttgtaagctcgtactccacgtatgacaacaacggcctgccggcaggcccgatctgcaacccgggtcttgatgccattatggcggcaatctatccatcaaccagtgatgattgtcgtaatgcctattatttctgtcatgacagcaatggtaaggcttactacgcttccacgatggatgatcatttgatgaacatggcgaaagccggtctgctgtaaccgacacaacatttacgataacaaagctacctgtgcctttccggcgaattttgtccgggaaggcacaaatgcagtaaaggaatgaatttcatggaacaaaaacgatataacgcgccggagcttctggcgccggtcggcgatatggagcgccttatttccgccgtgcgctacggtgcggacgcggtgtatcttgccggtaaatccttcggcatgcgctctgcgccttccaattttacaaacgaggagcttgaagaagctgtaaaatactgccacgcgcagggcgtgaaggtctatgtcacctgtaatattctgccgcataacgcagaacttgccgcgctgccggcgtttctcgagttttgccagacaatcggtgtagacgcgttcatcatgaccgacctcggcgtgatgtccatggcaaaaaaatacgcgccgaatgtcgcgatacacatttccacgcaggccggcgttgtgaactatgagaccgcaaacgcgttttataacatgggcgcagagcgcgtcgtgctggcacgcgagctctcgtttgaagaaatcgcggagatccgcgcgaaaacgccgaaggcgctcgaaatcgaagcatttgtgcacggtgcgatgtgcgtttcgttctcaggccgctgcctactttcaaactacatgaccggcagagacgcaaaccacggcgattgcgcgcagccgtgccgctgggattattacctcatagaacgcacgcgtccggatcaggtgttcacgatcgaacaggatcagaaatcgacgtacgtcttcaattcccgcgatatgtgcatgatcgagcacattccgcagctcatcgaatgcggcatttcgagcctcaaaattgagggccgcgcaaagtccgcgtattacgttgcctgcgtgacgaatgcgtaccgccacggcatcgatgccgttatgaacggtaagccgcttccgcagtgggtcgtggacgaaacagaaaagatcagccatcgcgcgtacagcaccgggttttacaacggtcacgagccggggcagaccgtaaacagcggcggatacatccgcggctgggatgttgcggccgtgtgcgccggcgaagaaaacggcatggtgcgcctttcacagcgcaaccgcttcttccgcggcgagactgtcagcgtactggagccgggcgaagtgccgtatgacctcacacttagtgaaatctacaacgaggatatggagccaatcgaatccgcaccgcacgcgacgatgacggtctacctcaagaccgaccgaaaaatcaaagagagcgcgtttctaagagtgaagcgcggctgaataacacctccgtttaggacccatactcttcctatacggaggtgtttttatgtctacacgcaggatcatcgcaacgtatgcgtttgtgatgttctttctcgtcatcgcactgctcggcaccgtgaccgccgctttcggcggcacaagctatacggaagccgccgggcggcagagtttatataccttaacggccgccaaggcgcgcggcacgatctacgaccgcaatttgcagccgctcacaaacgccgagcgtgtttatgtcgctgcggtaatcccctcacgggaaacgcttgccaaattaaaccgcgctgtaccggaagaaaaacgcgaagtcctgcgcacggcgcttgaaagcggaaagccgtttctgatcgaagtcacaacacccgtcagcgatgacggcattcagacattttccgtcacaaaacggtatgcaaacccgcaaccggcggcaaatctgctcgggtatctcgacagcgactataacggcgcggacggtgtggaaaaaagcttcgacgcactgcttgcggaaaaccacggggaaatcgacgttaccttcgccattgatgcgctcggcaatgccatctccggcgaaacaatgcacgtggaaaacacataccgcattgcggacggcggcgtaatgctgacgctggataagcgcatgcagcagtgtgtggaaaatgcctgcgcggaaatcaaaaaaggcgccgccgtcattttagattgcaaaaccggcgaaattctggcttccgcaagcttcccggccgtagacccgaacgaccttgctgcgtgcatggaaaatgaagatgcaccgtttgtgaaccgtgccctgtgcgcgtatacgcccggttcggtctttaagctcatctgcgccgcctcagcgctcgaatgcggcatcgattacaaggaggtgtatacctgcaccggaagcattgttgttgacggcctcacgattacttgctacggcggcaaagcacatggggaagtgaatctccacacggcgttgcgcagctcgtgcaacgggtatttcatacagctcgcgcagaaactcggcgcggaaaagattttaagtatggcggaaaagctcggctttggtacatctgtttcacttgcagacaatttagaaatggccgcaggctcgctttcgaatgcacaagcccttaaaaacgcccgtgcgctggcgctgttttcgttcggccagggtgaaacgactgtctcaccgctgaatttggccgctgccgtaaccgccattgccgctgacggcatttatatgacgccgcggctcgtatacggcacggtcgatacaaatttatccgtacaggaaaccgaagaaaacaccggtgaaaaagtcatggagccgacgaccgccgcacgcttacgtgcctatatggaaagcacagcacgattcggtacagcacggatcggcgcgccgcaaaactgtgtttccggcatcaagaccggcacggcgcagacaggtgtatatgacgaaaacggggaagaaatcgagaattattggtatgcaggctacatctgcaatgcacaggaagagccgctttataccctcgtcgtgttggaagaaactgccggcgaaatgcatgtgccgcaggctttccgcaaaatcggcgaagcacttgtcgattttaattgacaagccggtaaaaaagcattataataagatatgtatgaggggaggagatatggcaagcctgaatcttgaagatatgcagcagattcaaaaagaactgcaagctaaatatctcgaaaagtggggaggtctttctccgaaaatcggtcgcgataagctcctttggatgatgattgaagccggtgaagttgccgacatcatcaagaaaaagggtgacgatgcgattttgaacgaccccgagaccagacaccacttcacggaagaagtgtgtgatgtgctcatgtatttaaacgatgttctgctgtgctacggcatcacgccgaatgaagtcgagaacgtatatctcgaaaagcacaagcgcaacatgagccgctggtgattttagattttaatttgttttatagcaaaaggcacgggcaaatgcacatagctgtaccgaacagagagcggatccacaggctggaagatcctcggaaaacaccatgtacaggccaacccgtatgactgccgcacagtgatgagctgtgccgttttccgcgttaaggagttcaaagtggtgtatgaagaaaagcttcatgcacaatttgggtggtaccacggaactgtccgtcccattgcggaggacagttcttatttttttgtaaggagtggcaaaacatgaatatggactattgcctttccgagcttaaagccctgctttccatcgattctccgtccggctttacggataaagctgcggactatcttatcggtgaactgacagcactcggctacgctccggaaaaaacaagaaagggcggcgtttttttgctgcctcggcggcgagggcagcccgcttgtgctgatggcacacgtagacacgctcggcggcatgatttccacaatcaagccgaacggccgcatcacgatcacgccgattggcggcttgcgcgccgaaaactgcgaagcggagaactgccgcatttactcgcgcttctccggcgtttacagcggcaccttgcagctttgcaatgcgtcgatccacgtgaacggctcctacggtgaaaagctgcgcacatttgaaacgaccgaggtcgtgctcgacgagccggtaaaatccgccgatgatgtgcgcgcacttggcattgaagtgggtgatttcgtctgcttcgacccgcgcaccgtcatcacggaaagcggctatatcaagagccgtttcctcgatgataagctcagcgccgccatgctgcttgcgctcgcaaaggagatcaaagacaacaaccgcactttgaagcgcaaggtctatctgcactttacggtgtatgaggaggtcggacacggtgcttccgcttccgtgccgaacgatgccgaagagctcatcagcgtagacatgggctgcgtgggcgacgggctcacctgcacggagcgcgaagtttccatctgcgcgaaggattccggcggcccgtacaattatgccgtgacaaccgcgcttgtggaagcggcgaagtccgtcggtgcaaagtatgccgtggacgtttatccgcactacggctccgacgtagaggcatcgctgcgttccggctgggacgtgcgtcacggcctcatcggcgcaggcgtttacgcttcacacggctacgagcgctcccacattgaaggcgtcgaaaatacgttaaagctgcttgaggcttatgttttagactgagcttaggctttttatattattctatctgcaaattatagaaggaatggtgaatacaatgcagtggacaggattaaatgatctcagagaaaagtatctttctttctttgagtctaagggacatctgcgcctgccgagcttcccgctgattccgaaggatgacaatagccttcttctgatcaactccggcatggccccgatgaaaaagtattttacgggtgaagtgaccccgccgagaaagcgcgttaccacctgccagaagtgcatccgtaccccggatatcgagcgcgtgggcatcacggcacgccacggtacattcttcgagatgcttggcaacttctcctttggcgattacttcaaaaaggaagcgaccgcctgggcttgggagttctttacaaaagttctcgagatgccggcagataggctttatatctccatttatcaggacgacgatgaagcgtttgacatctggacaaagcaaaacggcgtagacccgtcgcatatggtacgccttggcagagaagataacttctgggagcatggctccggtccgtgcggtccgtgttccgaaatttattttgaccgcggcgaaaagtacggctgcggcaagcccacctgcggcgtgggttgcgactgcgaccgttacgttgaggtttggaacctcgttttcacgcagtttgagaacgacggcaacaacaactacacgccgcttgaccatccgaacatcgataccggcatgggtcttgaacgtttggcatgtgtgatgcaaggcgtggacaacctgttccttgtcgataccgtgcagaacatcatgaagcatatctcccgcattgcaaatgtgcagtacggtgcggacgaaaagtccgatgtttctctgcgcgtcattacggaccacatccgcagcacgacgtttatgatcagcgatggtgttatgccgtccaacgaaggccgcggctatgtgctccgccgtctgctccgccgcgcggcacgccatggcagacttctcggcatcaaccacccgttcctcgcggacgttgtagatactgtcattcacgaaaacgaatgcgcttacccggagctgcgtgaaaagagtgctatgatcaaaaaggtcatcgcgtttgaggaagaaaacttctataagaccattgataagggcttcgcgctgctcaacgacatcatcgaccgcaccgatgcaaaggtgctttccggcgaagacgcgttcctgctcagcgatacgttcggcttcccgattgacctgaccaaggaaatcctttccgaaaaaggcatgagcgttgacgaagaccgcttccgcgcactggtactccagcagcgtgagacggctcgtgcaagccgcaagaatgccggtgcagacgcatgggcaggcgactccgctgtgcttgacgacattgcaaagaccgaatttgtcggctacaccgatatgaaggcaaccgcaaaggtcacggctatcgtgaaggatggcgcacgcattgaagctgccgagaccggcgacgacatcgtgttcacactcgaccgcacctctttctatgcggaaagcggcggccaggtcggcgataccggcgtcatcacgaacgattcctgcaccatccgcgttctggataccacgaagaatgcagcgggtgtgtttatccacaaggctgttgtggaggaaggcttcctccgcgaaggcgacaccgttgaggctgttgtagatgttgagagacgcagagcgatcatgcgcaaccacacggcagctcacctcctgcaggctgcactgcgctccgtgctcggcgaccatgttgagcaggccggtcagctcgtcaacgagaatgccgttcgtttcgacttcacgcacttctccgccctgacggacgaagagctgctcgcggttgagaacctcgtcaacaagaagatcctcgaagacatcaaggttgagtgccgcgaaatgccgatcgaagaagcaaagaagctcggtgctatggcgttgttcggcgaaaaatacggcgacgtcgtgcgcgttgtaacggtaggcgaattctctaaggaattctgcggcggcacgcatattgattccaccgctaagctcggcctcttcaagctcgtcagcgaatcctccgttgcagccggtgtgcgccgtatcgaagcggtcacaggtctcaacgtcattaagatgatctacgcaacgaacacgctgctcaaggataccgctgttgcgatgaaagtcaataacccgtccgacctcccggcaaaagctgcacaggtcaacgccgacctcaaggagaaggacagagagatcgaatccatgcgctccaagattgcatccatgaacctcggctccattctggataacgccgtggaagttaagggtgtcaagatcgttacggcgatgctctccggcacaggcagcgacgcactgcgcaccatgtgcgataagatccgcgacgaaaagagcgatacggccattgtagccgtgctcgcaggcgttctggacggaaaggcaacgcttgcagcgaccgcaacgaaagcggcacaggcaaagggcgtcaaagccggcgtgcttgtaaaggcagttgcacagctcaccggcggcaacggcggcggtaaaccggacttcgctatggcaggcgtcaaggaccagacgaagattgacgaagcccttgcagctgttgaaaagatcctcagcgaacagatctaagttctctctatacgttctatataaaatctcaagaaaggagaaaggcaaatggactgcattttctgcaagattgccaacggcgagattccgagcacgaaggtctacgaagacgacaaaatgctcgcattccgcgacctcgacccgcaggcgccggtgcacattctgatgattccaaaggagcacatcgcttccgcagatgaccttacggaagaaaacgcgcagatcgtcgcacatatcttcacggtcgcaaagaagattgcggcggcagaaggtctcacgaacggctatcgcatcgtcaacaactgcggcgaagacggcggacagaccgtaaagcacctgcatttccacctgctcggcggacgctctatggcgtggcctccgggctgattccccgcatatgacgaaaatcgataatttttgaaggtaggtttttacaatgggtgaagtttataagatgacgatcgccggctgcgaacgcgagctgccgatctgcccgatcagcgatacgctggatattgccggttttgttatgttcggcgatgtagagatcaccgagaaggccgcaaaagcgctgatggaaaagtgcccggagcacgacatcatcatcacggcggagtctaagggcattccgctggcttacgagatggcgcgcatcggctgccgtcagtacgttgttgcacgtaagggcatcaaggcgtacatgacgaacccgatcaaggtcgaggtgaaatccatcacgacagaccacatccagacgctgtacctctccgaagaagactgcgcaatgctgaagggtaagcgtattctcatcgtagacgacgtcatcagcaccggtgaatcgctgagcgcgttggaagatctcgtgcatgagatcggcggtaacgtcgtcggcaaggcggctgtgctcgccgagggcgatgcaaaggatcgtacggatatcatctatctggagccgctcccgctgttcttcaagtaatttcataaaagctaaaaaagctgttcgcttcggcgggcagctttttgctttttatagggtatttccggcagcttcaatgcataaaaatctatgggtgatgcggcttgaaacggtatttgtcttttaaaatcgcgtatattcctgtggtgtttttcctcggtgctctgacattttttgtgtgctctgttttgggtgcggtacatgcggtatctgtggccgcagcacagaccgaaaaccgccccgtgatcgttctggatgcagggcacggtggggaagacggcggggccgtaggcgtaaacggtgtggaagagaaaacggtaaaccttgccattgcgctgtttgtgcgagagaagctcgaagctgcgggctaccccgtgaaaatgattcgcgaagtggacaccgccgtcggcgataccacgctgagcacattaaacgaacgaaagcggtctgatattttataccgcacacagatcgtaaacgaaactgagaactgtattttcgtgagcatccatcaaaacttttttgagcaaagtcaatacagcggcgcacagatgttttactcagcaaataatgctagaagcgccgaccttgccgaaaccatccgccgtgcggtcatcgagcaggtgcagccggataacacgcgtgcctgcaagcaggcagaaagccgcgtgtatattttgagccatgtagacgtacccgccgtgtttgcagaatgcgggttcctctcaaacccggaagaagctgaaaagctgtgcgacgagaactaccaaaagaaattggcggcggctatcgcggatggcattatcgccttttgcaaagcggaataactctttacaaaacatctgttccgtggtaaaataaacttagaattatacaaaataagggcggtgcgcgttatggcggctaaaaataaaatcgtctacatctgctcaaactgcgggtttgaatccgcaaagtgggcaggaaagtgcccggattgcggcgagtggaacaccatggaggaatccgtcaaaacggctgtttccgcaaaatccgccgcttccgggtatacttcttcagcttctacgctgctgacgcgcccgcttgcaatttcagagatcgatacggaggacgagcatcgttatcacaccggactttcggagcttgaccgcgtgcttggcggcggccttgtaaaaggctcgctcgtgctcatcagcggcgacccgggtatcggcaaatcaaccattcttttgcagatctgcgaatacctcgggcaaaagctgcgtattttatatgtttccggcgaagaatctgcacggcagatcaagctgcgcgcagggcgtctcggtgtttccagtcccaacctgcgcattttggcggaaacggacgtgcagctcgtggtggagcacattcgcaccgaaaaaccggatatcgtaatgatcgactccatccaaacgatgaactttaccgatctcaattcgtcgcccggcagcgtcacacaggtgcgcgaatgcacgaacgcgatcatgcgctgctccaagtcgctcgatatcccggcgattctcgttggtcacgtcaacaaagacggcgccatcgcgggtccaaaggtgttggagcacattgtggacgccgtgctgtacttcgagggcgaccgccagatgacgtaccgcattctgcgcgccgtaaaaaaccgctatggctccacaaacgagattggcgtattcgatatgggggaagcggggctgcggcaaatcgaaaacccctcgcaggcaatgctttccggccgcccgacgaacgcttccggcacatgcgtaaccgccgtaatggagggtacacgtccgctgctcgcggagattcaaggccttgcaacgacaagcggcttcggtacgccgcgccgcatgtccacgggctttgattatgcgcgtatggcgctgattttggccgttctggaaaagcgtgcaggtttctatttttccaatttagacgcgtatttgaacgtcgtcggcggcctgcgtatcgatgagccggcggtcgatctggccgttgcaatggcactcgtatcaagcctgaaagacacgccaatccgcgatgataccgtcgtgttcggcgagattggtcttgcaggcgagctgcggtcggtcagtcatatcgagtcccgcgtttcggaagcatatcgactgggattcacgcgctgcgtactgccgtaccacagcatgaagagcatagattcaaaaagattcagcggggtggagctcatcggcgtccacaacgtgagggaggcgtttgacgcatgtgtgcagtaaaagaacgatttgttgaaaagccgaatctgccggaaagcaaggtcacgacagcggcggtctccggcgcatatccggagattttggaagctttaaaggcgcatggtattcggtgcgtcacaacggagtttgacacgcgtctgccggatccgatcgcgtaccatgcagatatgcagatgtttcatttggataaaggacgcacgtttgttctgcgcggagaagaggcactcaaaaagcagcttacggatatcggctatcaggtagcggagactgccatgactccggagccgaaatatccgaaagatgttctttgcaacatgttaaacctgaacggcacggtgcttgcaaacctcggtgttatggatccgaacatttacacctgtctggaagacgccggccttaaaatgaggcatgtcaaccaaggctacacgcgctgtgcgacggctgttgtggcgaaagacgcgatcatcacgatggatctcggcattcgtgcactggcacagtttttaggcatcgacgtgctgcttgtgcacgaagaaaacgtttttctggatggctacgattacggcttcttaggcggctgctgtggcttgatcgacaaaaatgtggtggcgttcacaggcaagctcgattctttagagtgcgcggcggagattcgtgcgtttctcgaaaagcactgcgtacagtacattgagctgacacaaaaccagatgatcgatatcggcggcattttaccgctgatggagcttgacgtttaattcctaattttgtgtttaaaaagcctcccacgaagtttccgttgttgataatacactaaacgcttgtgtattcatgtacaagcacccaaacacgcacatttcaaaacagattcacacggaagcatacaaaggggcttgaatctaaaaaatctcaaattatacaaaatagatattttgtataattttggggagcagcattttacgaatagctggcttttcaagcggattttcgtaaaacctgcgagatcatcctttttcagccaaactcaatgttttgcgattgcaacttgcttaaataaacgcattcattatgaatcgtgattgtgtgcgttgattctttgtaaatctcggctgcggaaatccgtgcgtttctcaattagattgtttttaataacctcggctccgtttattcagctgtctgtttaagtaccacggcatgtctatacgtctcgttccgaattataatgatgatccaagagtaaattcaagtatcgattaggctaaacccgaaagctttgaagccaacggagctgaacaccaagctgcggctttaaaattcaaaatttgtgaggtgtacccgttatggatattttgtctgaaatgccggagattgtgcggcaatatgctttatattaccgcaacatcaaaggccgcgcgccgaagactgtaaacgaatactgctctgacctgcggacattctttcgtttcatgaaacattttcgcggatatgtttcacaagatacgcccatggaggagattccaatcgacgatattgaccttgaatttatccgttccatcacgacgatggacatttttgaattcatgaactacgctgccgacggacgcagcaacatgagctccacgcgtcagcgaaaatcttcgagtctcaaaagcttttttaactacctgaccgtgcacgagggtcttttggattctaaccccacagagaatctgaccccgccgaaaaaagccaaaacccttccccgctacctcacgttagagcaaagccgcgagcttttaaacgccgtggacgggccggataaagagcgtgactattgcattttgacgctgtttttaaactgcggcatgcgcctttccgagcttgtttccatcaacatgagcgacgtgatccacaacaactccaccctgcgcatcgtcggtaaaggcagcaaagaacgcatcgtatacttaaatgacgcatgcttagcttctatcgatggctacgtgcgtgtgcgcccaaaggacgacgtgaaggataaaaacgcgctgttcatcagcaaccgcggcacacgcatcagtcctaagaccgtacaggccatggtcaataaatacctcacgaaaatcggtcttggcggcgcgggatactccgtacacaagctgcggcacacggcggcgacgctgatgtaccaatacggcaacgtagatattcgcgttttgcaggatattctgggccacgaaaatctcggcactacagagatctacacgcacacctccagcaagcaaatggaggaagccgtaaacgccaacccactttccaaaatgcgtgaaaagactgataagaatgagaaataattgaaattgagcaaaatgaaagcctctatcgatttcagttcgatagaggcttttatgtttgttttaaattactgtaaatgatcggaagtatccgttttatccgagaacagagattcctgctccatgatcttacggtcgatcaagcggccgttcacgtacacatactgcggcttatcgtcgtcatcgtcgtccaactcatcattgtcgaaattgaacgtatcgccgtctttggctacgcgaatttcagcgtccttcgcttccgcttcctttttgtagaacggctggatcaggtacgtatcgagcaacgaatacgtcgcaaagctcgtcagatagctgatgaacgcacacaggaaaatgattacgagcagcagcgggatcactgcaaatgccgccgggcagaacaaaaacgcaatgaataaacccgcaaggattgccgtaatcatcaggttgcgcaacagacccataatagagaaaataaacgcgtttctgtaaatgtggcgcagcttcaagtcaaacgtgacgatcataaccggaatgtaatactgcgcaaacagcattagaatcgacaggatgcagcaaactgcaagcggaatcataaacatccagttgtccgatacacgtgtggaataaaagaagattgagaagctcaagattacatatgcgagatacacgatcacgccgttcaaaagtgccggcttccagttgtttttcacagcgtcccagaaatccgaccaaacgaacgcatgctcttcccttgcgaagtttcgcgttacatatgctaagccgcatgtgaacggcgaaagcaggatgagcggcagtgtaaccgcatacagaatgtacaggtcaagcacaccgaagaacgacgttgcataaagaaaatgcggaaccggtaaaagaaatacgcccaccatcaacgcgatgaccacaataaatgggatcataaatgtcagattcaactgcaccagtttagacagctttcgccacaagatctcaaaaaaacgtaccggcgctgcctttttcggttcatctttgtcaacgcccggacccggcttatcataattaccgaaaagtcctaaaaatgccacaaaatcaactccagaattagattaactcgtttttgcacgaggatgacactcattatacacgcttttcacgtgattatcaaggtctaataaatgaacatatacctgtgtggacgaaatatctgcatgtcccatcatggtttgaatgtcttttacggaagcaccaccctgcaaaaggtgcatggcaaacgaatgacgcagcgtgtgcggcgtaatctccttcgtaatgccggcctccgccgtatacgccttgataattttccagaaaccctgacgcgtcaaacgcgagccgttcagattgacaaacagcgcgtctccgctgttgtccgggtccacgatcaaatcgcgcatgcggtaaagataatcggacacagcaacgaccgctttcgcataaatcggaatggtgcgcacgcccttggtgccgcggcagaacagctttcccgtgcgcaggttgatatcctgcacgttgaggttgatgagctcactgacgcgaataccggtggcataaagaagctccagcatcgctttatcgcggcagcccttagcttccgtgacattcggctgggaaagcagcaggtctatctcctcgcttgtcagcgtctgcggcagctttttcggctctttttcaagctttacggatttcgccgggttcacctgcatatccccgcgcaggatgagaaacttataaaagcaacgcacagaggcaatattgcgggagatcgtggaatttgtgcggtttaagctgtgcaaatgctgcacatacgcttccaccgtctccgtttccacttcgagtggagatgttatattttcaccctccaagtagcgcaggaaagccgaaacatcgcgcagataagaatcccgcgtatttacggaactcggtttctgcacgagcatgtactcgcgaaacagcacgaagtattcatccatgttcattcatttcggcctcctttgctttaaaatctaatctaaatttgcaaaatcaaaaagtgcaatgcaccgtataaaatcgaaatgaaaaccagcgccgcaaacgcaagcaaaaaccgcacggtgcagtttttacggaaagcggttctccgtttccgaaaaacacccgacagctgcgccttgccgtgcaaagcgcttccgccgcaagcagcaaaagcaccgtgatgcacagcattgtcatcggcagataatcaaagcaccgccgaaaatacgatccgataccctcaagccgaatcagtgccgtaagcgacgtgccaagcgtgaagcccttcagaattatcgcagcgggaatcacaagcacacccaaaaacgtcatgccaaataaaaaaatcggcaatgcgtaaaaaagcgaatcaaataaaaatgcggaaaatacaaacggaaagtccgttcccgtttcaaacggccccctaaaccacacagagccggaaaccggcgccatagctatttgcgatgtccgtgcgaataagcagccgaacaaaaagccgagcaggaacaaaatgcgcaaagccattaaaacagataggctacgtggttttgcatatttcggctttgcttccattttcgttcaccacctataaaagatggtcaatctatatgtgaagcatcgccgtgttatgccttgcacactcacatggaaagttcttcggcgcggtgcgtgcaggcttcaaacgagctgatcatcgcctcattaaagccctgttctttcaagacattcagcaaagcaaatgttgtgccgccctttgacgtgaccatatccataagcgcctgtgggtctttgccgctgtttaaaagcatatcggcgctgcctttcatggtctggcagaacagtgtaagcgcggtcttcgggtcaatgccctgctgcgctgcataatcacaagtgagctttgcaagcagatacaaatacgcaggcgagctgccactgaccgcaatcaccgcattcatctgcgcttcgtcaatctcctgcgtgacaccgcagcaggagaaagcggaacgcacgcgcgcaaagtcttcttccggcacattgcttgtccggcacagcgccgtagcgccctcaccgagcagcagcggcgtgttcggcatggcacgcacgtagcggcggtctgcgccgagcgcgtcctgcaaattcttaaacgttacgcccgcagcgattgaaacgatgacaacatcgtcagcattcttcttcgcaacggtcggcgcaataacgcgcagcacctccgggaaaatctgtggctttacgcaaaggaacaccgtatcacaaagctcggtaacttcttcggcagaagtacaggctacgcagccggattctgtaaagcgctgcattttttccgcgtgcggattgtacatataaatatctccgaccgggaaagtgccggaagataagataccgccaataatcgcggacgccatgtttcctatgccgataaagcccaatttgccgtttttcatgatacgccacctcacttctgtcttatatactataatactttttagccaaatttgcaagagcttccgtgaatatttttgcatctgcacaaatttatgtctataatcttatgtaaacttatgaatatgcagttctgctttgctacaagccgttgtgaataaatatgcaaaatcgttcttatactcttgattagcagctacaaaattatggcttaaaatctgattttttcatctctattcacgcccattactccaccgcatacgctgcatattacaaatattacgctccgtataacaagaagtacaatccgcatatttgcatacagcataacgcttatcgcaacatagaaaactgcatagagcgtgccaagcacaaggccgtgcagcaagcctttttcccccgcgaggcgcgccgcaaggaaagcggaagcaaaaacggaaacgccgccgatcgccgccgcagccgtaccgagtataggctcggacggcaaaaagccgagctttaaaatcataaaggcacaaaccgcgatcagcacagccgaaaacagcacagaaaacaggagacccaaaaacagcttcttaaaattcagcatagaaaaagccccttgaaataagttttgtttcatacttattccaaggggctcaaaactattcgcttttaaacagagtgaaacttacgcgtcttcctcgtggatggtatcgacgctgccgatcgcccaacgcttgatgcgcagtcttgcacggtcgctgccggtctcgatgataacgctgtcggtctcatcctttacagcgatgattctgccgcaaataccgccgatggtcgtgatctcgtcgccgacctgtgcgttcttgcgcatttccgcttccttcttcttcttcttgttctgcgggcggaagaagatgaagtacatagccgcgatgatcgcaccgtaaacaaggagcatgatcagcatgctggacatgttgccgccggctgctgcacctgtcgttgtcaaaacactcaaattcatggttttctttcctttctttcatggtgcgctccgttcgactgcaaagcggtcaatacacccgtcaccaaattaactttatacattataacaaaagccattcgtggttgcaaggattttctaaattcttttgttaaatttctctgaatactcctgataaaatgcttcaaaccggtcttcatcgagcgcgttacgaatgcgttccatcaaattgttgtagaaataaagattgtgcataaccgtcaagcgcatggcaagcatctcccctgctttgaaaaggtggtgaatataagcgcgggaaaacttgcggcagaccgggcagtcgcaggtcgggtcgatcggttgatcgtccagcgtgtatttcgcattgagcatattgcgcacgccttcatttgtaaatgcatgaccatggcgtgcattgcggctcggcatcacgcagtcgaacagatcaacgccgcggtgcaccgcttccagaatatttgtcggcgtgcccacacccatcaggtagcggatcttatcctgcggcatatgctcttcaaccgcttcaatcacttcatacatgacctctgccggctcgccgaccgcaaggccgccaatagcataaccatcgagccccaattccgcaatctccttcatgtggttcacgcgcaggtcgatgtatgtgcaaccctggttgatgccgaacagcatttggttcggattgatcgtatccggcagcgcattcagtctgttcatctccgccttgcagcggcgcagccagcgtgctgtgcgtgcgcaggaatttttcgcgtagtcgtattccgccgggttttccacgcattcgtcaaacgccatggcgatggtagaaccgaggttggactgaatacgcatgctttcctccgggcccatgaagatgcgatggccgtcgatgtgtgacgcaaacgtcacgccttcttctttgatattgcgcagcttcgcgagagagaaaacctgaaacccgccgctgtccgtcagtacagggccgtcccagccggtaaacttgcgtacgccgcccattttgcgcaccacgtcatcgcccgggcgcagatgcaggtggtacgtgttggagagcatcacttgacatttaatatctttaaggtcgtaagcagaaaccgcacccttaatcgccgcagccgtcgcgacgttcataaacgccggtgtctgcaccgtaccgtgcacggtttggagctcgccgcgccgcgcgtggttttctcttttgataagcttgtacatgtaaagaaaattcctttcaaatttatttgatgaacatggcgtcgccgaagctgaagaagcggtagcgctccttgacggcagtgttatacgcattcaaaatgtgttcgcggcccgcaagcgcggagaccagcatgatgagcgtactttccggcaagtggaagttcgtgatgagcgcatcaaggcccttaaattcaaagcccggatagataaaaatatccgtccagtcatcgtcctcgcaaattttgccgcatttctttgcgacagattcaatcgtgcggcagctcgtagtgccgacagcgatcacgcgtccgccgtttttcttcgtctcgttgatggcatcggcagtctctttcggcatgtgataatgctcgctatgcattttgtggtcgagaatgttatccacgctcaccgggcggaacgtgccaaggccgacatgcagtgtgacgaacacgaccttcacgccttttgagcgaattgcatcaagcagctccggcgtaaagtgcagaccggccgtcggcgcagcggcagaaccttcctctttggaatacaccgtctggtagcgctctttatccttgagcttttctttaatatagggcggcagcggcatctggccaatcttatccagctccgtgaagaagttcgtgcccttgtcgtaatggaagcggatcatgcggttgccgtcgtccttcacttcaatgacctcgcaggtcatggagctgccctcgaacatgaacgatgtgccgacctttgcacgcttgcccggacctgcaagtgcttcccatacgtcgtcaccgcaatttttcagaagcaaaaattcaacgtgcgcgccggtctcgtttttaatgccgtaaatacgcgcaggcaaaacacgggaattgttgagtacaagacaatcgccctcattcaaatactccgtgatgtcgtgaaaatgcctgtgctcgatctcaccggttgttttgtccaacaccatcaggcgcgaagcgtcacgcggttcaatcggcgtctgggcgataagttcttccggaagctcaaaatcaaaatcttttgtttgtaaagtctgcgtatccaagtatattccttccaatctgaattaaaatagccgcatcccccaaattacgcaggattattctaagaatttttcataaataaattgacaacaatccgtattccatgtattataataaggatagaggcgcggtttgtaagagtatccgcgggttttggccctccacaggcatcggcccgcagaaaaaggacacaccgccgaagatctcagcgcatgtggtacgcttggatctggttgctgtggcgaaagccccgtaactgtcatctgcaataggatggagtgctatcagagcttttccgcagggagactttcgtaaaagcctgtgcacattctattatattgtatgtatgaccggatttcaaccggttttttttcgctcaaaaatgaaatttgaccttaattttgtttttgagcgtacatttcatcatttttgaaaggatgtcctgcaaacaggacgggtgaaagaaatgaaaaagtataatgtcggtatcattggttgcacaggcatggtcggtcagcgttttgcaacactccttgaaaatcatccgtggttcaacgtgaccgcgcttgcggcctcttcccgctccgccggtaaaacatataaaagcgtcgtagaaaagcgttgggctatgaaaacgcccattcccacaagtatggcggatatgatcatcttagacgctgttgcagatatggacgaagtcgtctccaaggtcgattttgtattctgcgccgtcgatatgaaaaaagacgaaatccgcgcccttgaagaagcttatgcgaaaaaagagtgcccggtcgtctccaacaacagcgcaaaccgcggcgtcgaggatgtgccgatggttgtgccggagatcaacgccgaccacattgaaatcatcaacgcacagagaaagcgcctcggcacaaagcgcggctttatcgccgtaaagtccaactgctcccttcagagctacgttccggctattcacccgctgatggacctcggcgtcacgaaggtgctcgcctgcacatatcaggccatctccggcgccggcaaaacctttgaaacgtatcccgatattctcgacaacgtcatcccgtatatcggcggcgaggaagaaaaatccgagcaggagccgatgaagctgtggggccacattgagggcgataagattgtcaacgcgaccaccccgtccatcacggcacagtgcttccgcgtgccggtttccgacggccatacggctgcggtgttcgtctccatggaaaagaaggtctcaccggaggaaatcatccgccgttggacagagttccgcggcccggcacaggagctcgagctgccgagcgcaccgaagcagttcctgcactactttacggaagcagaccgtccgcaggcaaaactcgaccgtgaactggagcatggtatggccgtttccatcggcagactgcgcccggatacccagtatgactacaagttcgtttgcctttcccacaacacgctgcgcggcgcagcaggcggcggtgttctgcttgcagagctgctcgcaaagaagggctattttgactgataccgttcaggaggtattttttagatgaaagaaaccatttttaccggcgcagcggtggcacttgttaccccgtttaacccggatatgtccgtaaactacgaggagcttgaaaagctcatcgagtttcagatcacaagcggcaccgatgccattgtcacctgcggtaccaccggcgaagcggcaacgctcaccgatgaagagcacgtgaaggtcatcgagttcaccgtaaacaaggttgccggccgcgtgccggtcatcgcaggcaccggcagcaatgataccgcctacgccgtggagctctcccaaaaagcagaagcactcggcgcaaacggccttctgcttgtcacgccgtactacaacaagacttcccagcgcggcctcgttgcaagcttcaaccgcatcgcaggcagtgtaaaaattccgtgcattgtgtataatgtcccgagccgcaccggcctcaacattctgccggaaacgtactacgagctctcgaagacgcagaacatcgttgccacaaaggaagcgaaccacgacatctccgcgctcatcaaaacgcgtgagctttgcggtgatgacctcacggtttactccggtgaagacacgcagactttgccgattgcgtctctcggcggcaagggcgtcatctctacattctccaacatcatgccgaaagaaatgcacgagcttgccaccgcttctgttgcgggcgacctcaagacggcgcaggcactcacgtttaagtatctcgacctcatgaacgcactgttcatggacgtcaacccaatcccggtaaagcaggcattgaacctgatgggcttcaactgcggccactgccgcttgccgcttgtcgatatgtccgatgagcagattgcaaagctgaaggccgaaatggcaaagcatctgcagctcgcctgattaaaagaaaggaacggacgtaaaatgacaaggattattttatgtggctgctgcggcaaaatgggtcacttcatcacgcagcttgtttccgaacgcaccgattgcgagattgttgccggcgttgatctgaacgtcaatgcacagactgcttcctaccccgcttacacctccatcgatcaggtagcggaagcggcagatgttatcatcgacttctcccacccctcccttttgacgccgattttgcactacgcggcggaaaagggcggcattccggccgtactctgcaccacgggctacacagcagagcagaccgcggagcttaccaaagcttccgaaacgcagccaatcttctattcccgcaacatgtcactcggcattaacctgatgctggagcttgcaaaaaaggcggcaaaggtgctcggcgaccagttcgacattgagatcgtcgaaaagcaccacaatcagaagattgatgcgccgagcggcacggctttgatgcttgccgatgcgcttgcttccgtgcgcgacggcgaaacgcagtatatgtacgatcgccacgcacagcgcaaaaagcgcgaaaagagcgagattggcattcactccgtgcgcggcggcaccattgtcggcgagcatgaagtgatctttgcgggcaacaacgaggtcatcacgctctcccattctgcgcagtccaaagagctgttcgcggtgggcgcagtaaacgcagcggtattcatgagcggcaaaggccccggcctttacgacatgtccgctttggtttaagaaaggatggaacagatcatgggcacaaccgaaatcagcacggtcagcaatatcacactggtcaccctgcaaggcagccccgccaccacaggctttatggctgaggtattcgagcgcatcgcggagctcgatatcaacatcgatatgatctccatgcccccgaaccacggtgcaaatgccggcctttcttttaccatttctgaccaagacctcatcgaagtgctgtcttttgcgaatacgctcaagaccgagaccggcatcaaggttatcgtcagcagcgtgaaccataaaatctccgtctatgacccgcagatgaaaaacacgccgggcatggcagccagagtgttcagcgccatcgccgcaagcgacgccgacatccgcctcatcacgacttccgaagtcgagatctccctcctcgtcacggaagcggactacgacaccgttttggaagccatcgaagaagcggccaacgcgaaataatttttaggcaactataaatacgaaaacagaaggtcaagtctcttatccggcttgaccttctgttttcgattcttatgctttgtatttttgattcaatttcagagaataaagtttataaagcgtataagcactttcatttttattgtgatgaatcatgtttacacacggctcaacgagatctttatatacctcgttccagatttcttgggcgttcgatttttgattgatagcttcaacgataccctgtgccatttcatagtattctctgattttcgcttcgccgttcggccgatcgtgtcatatatatggcatattaaaacgagtgaacacaaaagccaaagcctctgaatacactcgtttttatggtgcgggtagcaggggtcgaacctgtgactttgaattaggttatgggcaactgtcgttgcctcattgtatcgcaacgccaaaacaattcaccggattgttttggctgcgacagataacagccgcgtgtggttgttgtgagtggtggaacagacttgtactcaatttaaagtgaaacattattgaggacacactcgtaaaccaactttttgcttacggtttttctgctatcgcaaatatacccgcacgtctgaaactgcccataccgtttggcataacatatttgtcgtaataatcgcagatttcaagaaatttcttgtccatactgatttcattgattttcttatgcacttcttgagcggaattctgccgataaagatgcaacaaatacagatgcgttagactaccaatgctgcgacattccaaaacattcatcccgtttttgttcaaaacatcccttaattcatcaatatcataggcttttaattcagcaatggatgtaagttcctcagcattgtcgtagttctctttgttaaagcaacctgtttccattatgtcctttacggacgggtgaatgtagtgcagtttactaagactatagttcagccatgtgactgtcatacaacttttgctagaaaccgaaagcattaccttttttccgactctgcatatttcagcaattacatcttctgccttgcttccagagaatgaaattgccccgtcaaaacataacacaaggtcaaattcattattctcgaatacatccagacaacaagcattgtgcttaataaactgaatgtttgttaaacctatcgctttatcttttgccgccttaatcatttcatcagataaatccaaatgtactacatcaaagcccattctagccaaaggtatggaataagctcctgttgctgctcctacatccaaaattttatgaacccctgataaatggctttgaattgccttgagcctcaaaagacgatttatcatttcatcgtcataatcaacttcttccgttttggacatttcatcccaaaatttctcatattcggtcaatttatttttattcactcctttaagtttggtgattaattaaactacaatttattgccctcattatatcatttaataaagcacttagcaagatgacaaaaagtccgccgtaattctatcaaaattacggcggacttatggtgcgggtaacaggacttgaacctgcacaccgaagtaccagaacctaaatctggcgcgtctgccaattccgccatacccgcatattttgttgactaaactattataccgtattctgaggaaaaatcaagcccaaacagagaaaaacccggaaagagtttctctccgggtaatttctcttgagcaaattacttatgccttcttctgctctgcgagcgcttcttccagtgcgagcgcgagctgatccgggcaggaggtgttcttaaagccgcacttgatgcccttgcagcgctttacgtattcgtcaacggtcataccgaccgcaagcgctgccacgccctgcgtattgccgttacagccgccatcgaatttcacggagcggataacgtcgccgtcgagctctacatgaatgcctctggaacatacacctttcggtgtgaaatcatacttcattttgcatttccctttcattcagaaaataatttatcaaattcggattcggccgtcgtgaacgtgccgaccggatttttctttgtcgtgtaaaagccgtgataatccgtgccgccggtgacggcaaggtcatacttttcagctaagcgcaacatttccgctttatcctcctccgtgttgcgcggatgataaacttcaatgccgcggatgcggtggtttctgcacagctcgcgcagaagatccatgctgtggtattcgctcgggtgcgccaagaccgcgatgccctctgcggcgtcaaccgcatccatcacggtatcgatgtcgggataatccaccttctcgtaggcgatgcccgttttggaatcatagagcttcttaaaaacctcgccgaacatctcactcgcgtagccggcgtccattaacgcctgcaaaacgtgctgcttgtagatattcgtcgagccctccgcgcggcgcagaatcatctcgcgcggaatcgcatacaggcggcagactttatcaacggagcgtagcatcgccgcatggcggctgtccgtcgttttttgcagcagcggcagcaacacttcgggcttcttcggcttatagcacaggatatgcgctttgccgtgacgcttcgggtctgcagcagaaatttccacgccgggaatcaccgtcacgcccgctccccgcccaagctccaacgcgcattcgcagcccgccatggtatcgtggtcggtgagcgcgaacgtcgtcacgccgcggagcgcagcaagctgtataagctcctcaagcggcgtggagccgtccgaatatcttgtgtggcagtgcaggtcaatagacattggttttctcctttcgcggcttttccggcggacgcgtcagcagcttttcggctgtgaagcgccggaacccgaagttgaataaacacaggtcgatcccaacgatgatcgctgtcaaaaccaaaagtgcaatactgttcaagcgatacaggcccataatctgcccgatgaaaatgagcaaaatcggcagcacgatatagccggaaatttgaatggattccgctgtggagcgtgctttcacggtcagcatcgcagcaaacgtaacgcccagcaccgtgatggccggcgagagcaaaaacaccagaacgaaccatgaaaggtcaaagaaaaacggtgctttcaaaaccgtatcgccgatagccgtggcgacaaagaacagaataaacgaaaccgccgtgacaagcccggaagccaaaacactgcttgccgccttcacctgcaaaaagcggcgcacgctgaacggcgcaaacagaagcgtttccattgtgccgtgtgcccgctcgcccgcaaacgtgtacgaagccgtaatgattgccgataaaagcggaatgagcataaacagcatcggcgagataaacgccgtgaaaatgtagaacatctgcgcgcgctcgtccgtcccctgcggaatgttatcgagcaggtttttaaactgctccacaccggaggattccggtgaaaccatagcggaaacgaacaggaacaaaagtgggaacgccaccgcaaaaacgagcggcagtgcgatgagcaacgtcaagatcagcctgcggcggcacaaagcggaaaggtccttcatcatgagtgcacgttccgctttggaaaacagcttataaaacagcttcttcatgcggtgtctcctctcccggctttttcacaaacgcgtaataaacatcctgcaatgtgggcgtacacacggatgcttcgtaaatgccgacattctcccgcacaagcccggaaataagctccggcatatcggcttcggatttgattggtttttcccacgcgccatcatgcagtgtgaagtcctccggcatcttctgcgtgtcgctcacgcggatcaccgccataggcgtcaattcagaagcggccgtaagcatcgaaaggtcgccgctcgcccgtaaaaagccgtgctccagcaccgcaaagcttgtgcagatttcctccgcgctttcaagatgatcggtgcaaagcagcaccgtggcgccggtttcctttgcgtaatccgaaagtgtgcgcagcaccattgcgtccgataccgcttgctcgccgccgggcaaaccgtccgaaaacacgatctgcgggcgatgcacaagcgcacgcgccagcgatagccggcggcacatctctgtggaaaacgtgtagaccttgcggtcgcgcgcgttccaaaggtcaagcttcttcaaaagctgcgccgcatgtgtacgggcttgctccttgcgcatgccatacatggaagcgaacatcagcaggttttccagagcgctcatgcttccaatacaggccgccgtatcggtaacgataccgcttttcgcgcgcagtttgcgactctcttttacagaagaaagtcccagcactgtgctgtcgccgagcgtcgggcgcacaagacccgttaaaaggcgcagcagcgtcgttttgccggatctctccgggccgaggcagccgacgatctccccggcttccacttcaaggtccacgccatttatcgcaatgatgtcgccgtattttttcgttaaatttgcagtttgtatcgcgatcatctgctcaccgcctctcagcgcacatcggaggtgcctttttcgcgcagataggttgattccaaatcagccatgtgcagcttcacagcgagcggatagcggtcaaatgccaggctgatggcaaagctgccgcccttcgccgcgtcgtcaaagccacccatgtgccagcggattgccatggcttccacaggctttagacgcataaaacgctcgatgaggtaaacggatttttcaccgtgaccgaacgggaatgcatcgtccaccgtgtaaaacggacgcttctcccactgcccggtctcgtcatttttcacgttgcgcgtggaggtcttataaaactgcgatttgcacacgtcgtgcagcagcgcacatatcgcaaagctttcttcactgtcgccctcgtcaaaccaacgctcgcgcatcgccttgtagacattcaggctgtgcatcacaaggccgctttcgcaggcacagtggaactttgtgcttgccggcgcggtgtaaaaatcggtggtatccagccacgccaaaagcttctgcgagccctcgcgcgtgatgttctgtgtataaatggagataaattcctctctgtacggattcgacatgcttgtcctcccgtagataaatttcaaactctgcgtatagtataacacagaaatcacgtgttttcaaacagtttcgcggtttgtaaagaaaaagaaaggtcatcgcagcaaatgccgaaatgacccttccggtaaatcaatgattgcccacgcagccgtgcttatcttccccgcagctatggctgccgcagtcatgaccgccctcgtggtgatggtgtgcacagacggtatccgggttatagagcagtgtgccgttcagcagcgaattaaccgccgcgtccgcgctgccggaaacaccgggatacaactcgatgcccgcttctgcaagcgccgtgcgcgcaccgccgccgatgccgccgcagatgagcgcattcacgccgtgctgcttcaaaaagccagccagtgcaccgtggccgctgccatttgtgggcgcgacctctgcatttttaacttcgccgttctcaatctcatagatcttaaacgcttcggaatggccgaaatgctggaaaaccagtccgttctgatacgttaccgcgattttcatgttcatgcttcctttcgaatcaaatattctattttctgctacgtgcagaatatgctccgcctgcggctgcgccgcgtttcggcatttgtcatattccgcacggctgcacccgccatgctgcggtgtgcagggcaactgctctgcggaaaacgccatgcgagagagctggctgctgagttctttaagcgccgcgcgattgacggtatagtgcatgaaataaccgcacttttcgccgaaaatgagccccgcttcacgcagaacttttaaatgctgtgaaaccgccgcttccgaaatatccagctgtcttgccagtgcgcgcacgcaacagttgcggcgcagcaaaaggcgcagcagcaaaaggcggttttcatctgccagtgctttgaacatcatagctgttgaccccatagcgtcctcctgattaagtatttgctaaattaaattatagcacgaattttaattaagtcaatactaaattaaattttcgcctgtaaaaaagcagcacaccgaaacgatgcgctgccaaaaacttttatgtacggtcattcaacagaacggaagcccttgccgatgatctcgctcgtattcgtgatgaacataaatgcctttttatcgacggaacggacatacgcgcggagcttcacagcttcaccgcgtctgcacgcaaccatgacgaccttgcaaccctcatgcgaatacgcgcctgtggcatccacaatggtcgaactgcggttcatcttgtgaatgatgtaatcgcaaatctcctccgggtgcgtggtgacaatggagaaatatttgcagaggttaataccttcaatcacggaatcgaccatgaacgccttgatagcaagaccgagcagcgaaaacaggcctgtgcggatatcgaatacaaacatcgcggaaaacgcgatgagcgtatcgctgacgagcagcgctttgccgatatcaagactcgtgtactttttgaggatcatcgcaacaatatccgtgccgccgctcgaagcgttgcagttaaagaggatcgccgagccgaccgccggcagcatcataccgtagcacagctcgaggaacggctggtcggtaagcggcttagaaagcggaacgagcttttcaagcagccacgtcaaaaacgaaagcagcatgctacaatacacggtaagcacaccgaaaccgcgtcccaaaatgataaaaccgacgatgagcaagatgatattgataatccacatgatacccgctgtggagaacgacggaaaaatatgaccgagcagaatagagataccgctcacgccgccggtggaaaaattattcggaaatttaaagaaataagtgccgatggcaaaaacaaaggtgccgaacgtgatgagcataaacgtctttaaattctgttttgtaagcttttccttaacattttgaatcgggttattcatactgcgccaactttcctcattacaggcgaagcgcctgtttttaatccgtttgagattttaacacagcaaacaccaaaattcaacaggaaagcatacaaatgaataattgattttccccccgtcattttttgcaagttgcgtctttcaaaacttgctttacatatgtttcgagcgcgttttgatacgccggaaaacgttcccgaagggaagcggcaaacgccacggactgtacgaaatcgcagaatttgtcatacggcagaaatttgtaatcgatcgtttcattcgcctgcagcgtgattgggatatccgcactttcaaccgttgcggcatacacgtaaaacaccgttgggccatgcgtcagacgcagcaaaaagttatgatgcaaaaaggagagcggccgaaaccgttctccttctgtgctttttaaaatcaaatcaggctgcggatgtaatctgccgccttgcggatatcgccctcggggtcgtcgccgacttcacgttcgatcgtcaggaagcccttatagccgatgtcgttcagcgccttgaagtacgccgggaaatctacgtcgccttcgccgagcggaagctcaatgaaggaagcgtcgttcagcatgtcggattcctccatgccgtacaggatctccgggctgacataatgcagacgcttgccgtcttttgcatgtgtgtgcacaatgtaatccttcagcgtgtagaccgcctgcaccgggtcgtcgcccgtgaccataacaaagtttgccggatcaaggttgacggaaacacccttggaatggaggccgtcaaggaaccccttcagcgtcgttgcaatctccgggccggtctccacagcgaagtgtgcctgcatggagtctgcatacgccgcaagctggccgcaagcatcctgcatgattgcatagcgcgggtggctcgggtcgttcggtacaacgccgatatgcgttgtgatcacatcggtctcgaggtcctttgcaaggtctacgatgcgtttggatttttcaatgagctccgggttcagcttcgggtcgttgaagccgtggccgaggtcgccgcacagcgcagagatcgtcaggccgtgatccttcacgcgcttcaaaaattcgcggcgtgcttctgcgttcatattctcgggcgacatttcgcctcttgttgcgtaaacctgaatgccggtcgcgccgactgcaacagctttatcgagagccgtgagcgtatcggtgcggaagccgtccatcagaacgccgatagaaaagggatacataagcaatttcctttcttaatgcacagggagtttagcccagcgtgatctctttgtgctgctcggaggaatcgtaaatcgcctgcatcatctgtgccgtgatgataacggtatcgatgtgagacggcagcttcttgccggtcttgatgcagtcaatgaatgcgtcaatctcgttctggaagtggtcgcgcatcttaaagacaggcttatactccgtgagtgcaccgtactcggagctgtaaacggtgaaatccttgccgtactggagacggatgccacccttatcgcccatgaagtcgatgtaacactcgttttcgccgatgttctgcgcccaagcgccgtgcagagagatgaccgggccttcggtacggatcatgccgacaacggagtcgtccacgtcgtaggtgccgtcgtacttcgggggacctgcccacatgtcggtgtatgcgtagcccttcatgtccttgccaagctcgcagaaggcttcacccgtaacggtcttaaccttcgggtcaccgcagcagtacataacgatatcaaggtaatgcacaccccagtcaatcagagcaccgccacctgcaatcgcctttgtggtgaacgcgccgccgaggcccggaatggagcggtgtgcacggaagctggcatgtacatggtagatattgccgagcttgccgtcgtcgatatactttttgatgaggttcacgctgtcattgaagcggttgacaacgccgatgttgagcactttgccggtctcgtgctgaaccttctgcatctcaagggcttccttgtaggttcttgcagccggcttctcgcacagaacattcttgcctgcgcgcaatgcgtcaatggaaatggtcgggtgaacattgttcggggtgcagacggaaacagcttcaacttccgggtctgccaggacatcgtgataatccacaacagcggtgccgcagccgtacttttcaacggcagcctgtgcgcgctccgggatgatgtcgcagaaatacttgatttctgcctccgggttgttcatgtaagacgggatgtgcgctgcatttgcgatcgtaccgcaaccaataacggcaactttcattggaatacaactcctttaagaattttctgcgggctgcggaaggttctttttatcctcctcggcccattttttatattcacgcggcgccatgcccacatattttttgtaggcgcggctgaacgcatggatcgatttgaagcccatcagctcggcgacttttgtaacggaatatccctggcgaagatactcgtttgacttttcaaagcgccgcttcgtgtgataggatttcaggctttcgcccgtaaacgcagagaacttctgcgcaatatgggtataactgtacccaaactccgcactgagcgcgctgagattttccatggactcaaggtgcacatcaatgtaattgatgacatcgtagacgagcttttcatcggaattattgctgccgctcagtaagtagtttttgtagaactttcggctgaaaatgcggtatacgccgcagatgatctcctgcatgtacgcttcaatcaaaaggttcgagagtacgtcgtccgaaatgaattcggaaagcacgcgcatgaacgtgtcctgtaagctgaccgcgttatgaaactgcacctgctcgttcgtatcgaaaaagctcttaagctgtgcaatcttctcatttacgatcggctctacaaaatcaaagccgagataaaagaaacgcagcggttcgatctccgccgagatgatgttgtgcatctgtcccttgcgcacaaggagcaggtcacccttctgcatggtgtacaccgtatcatctacataaaatgcaccggtgccggaaagcacgtacgtgatttcgtagaccgcctgttcgtgctcaaaggtctggtaacctgcttcgcagcttaagtccccgatctgatacagaacatatggcccgtacagcatatccataccggcgtatgtattatcgaagtgaaattttgcccgattgaccggcattgtggtatcgcctctgtgtttacgcccttattataatgaaagaacgcaggaatgtatttgatattttttgcaaatcagatggtaaaaaacacaaccttaccagaaaatcagcttttcttcgcctctttttcaatggcatcgagctcccggcacaaatggccgaacaattcgccgctcacaacattctcgctctcgcccgtcatgttgagcgtcacgcgatccaaaaaagaggaaaacacttcaagctcttcttccgaaaagccctgaaacgccaccgcgtcgatctggtctaaccgctcgcggcacatggcacaggccctttgcccttcttctgagatataaagccgcttgcagcgtaagttttcggcatccacttcttttgtgagataccccgccttctgcaaacgctttgtagagagcgcaatggaggccgggctgacacgcagatggtctgccacctgcacctgtgtacacccgggatttgccgcaatgaaatccagcacaggcatctggccgaaatacagaccatgctcctgcgccccacgccgatgcgcaagctgttgcacaagctccagcttatgtaattttcccatcagttcatgcaattccatagccgcactcctcatacgcctctttgatattattataaccccgctgttaaatttgtcaacccatagtaccgttttcccgtgcacttcggctctatatttttctttacacagatgctttattgtgctatactgttagcagcttaattacaacaatttggaaggggtctaaaaaatgaatgaaacgattcaagttttgatgaaccgcaagtccgtccgtgtttttgaggataaggagatctcacccgaaatcaaagatattatccttgccgctgccatgcgcgcaccgaccggcggcaactgcatgccgtactccatcatcgacgtgacggatcagtccattaaggataagcttgccgaaacctgtgatcatcagccgttcattgcacaggcgaaaatggtgctcattttctgtgcagattaccaccgttggtacagaaagttcaaaatggcgggctgcgaaaacattcccgcgccggagctcagcaacatggtgcttgcaacggaagatgccgtcatcgccgcacacacagcctgcatcgccgcggaaagcctcggcatcggttcctgctatatcggcgatattgtggagaacttcgagattcacaaagagcttttaaacctgcccccgcaggtcgcgccgctttgcatgctggtcttcggctatcccacccagcagcaaaaggaaagaaagcagacaactcgttttgcaaagagctccatcgtgtttgagaaccggtatcgtgaactttctgaagaagagctgctcgaaatgatgccaaacgaccgcacgaaggcgttctataaccgcaaatatgtttccgattttgcgcaggaaatggtgcgttccacaaaagagatctacaaaaactggaactccaaggaataagccatgctgcacatcggttgtcatctttctgcctctaagggctactacgccatgggcaaaacggcactttccatcggcgcggatacgttccagttcttcacgcgaaacccgcgcggcagccgtgcaaagccgcttgatctgaacgatgcacagaagttaaacgagttagcggcggaaaaccactttgccgtgctgctcgcccacgcgccgtatacgatcaatccctgctccgcaaacgaagacacccgcacatttgcccgcgaaacgatgcaggatgatttgaagcgtctggaagccacaccgcacaatctctataacttccaccccggcagccacgttggacaaggcatcgagaccggcgtcacacagatcagcgaaacgctgaacgccattttatctcccgaacagaccaccacggttttactcgagaccatggcaggcaagggcacggaagtcggctctcattttgaggaactccgtgaaattctggaccgcgtaacgctctccgacctcatgggcgtgtgcctcgatacctgccacgtgttcgatgccgggtatgacattgtaaacgacctcgacggtgtgttgacggagtttgaccgcgtgattgggcttaaccgtctgaaagcggtacacattaacgacagcatcttcgggctttcctctcacaaagaccgccacgcaaagatcggcgagggcaagattggcacggaagcgttccgccgcatcatcaaccaccctgtcctgcgccgcctccccttttatctcgaaactccaaacgaactccccggctacaaagccgaaattgaacttttgagagcgatggttgaggagagctaaaaaagcttatattttaattaaaaagcaaaagaacacaaatcgttttaaactaactgctcacgatttgtgttctttctttatgtcgttcttctattcccctttctgccattacattttgaacacagcacctgcaaattagacgcaaccgtttttccgccttttgaaatcggaataatatggtcgatttggagtcctactccatccggcatgtactttccgcaattttgacatgtatagtgatcccgtttcatgatctgttggcgtaactcttttgtcatctgtcgccgctgatctcgactatggtattctttcagtgtcgcttcaaaccctattctctctaattttctatgacgttgtacaagccagtcccaatcaacagctatttcagaatcaagcacggacactttataggatgtcttcacgtaattttgctgtctgtatcttgtttgatctctaaccgttttaaagcgaaaagcaaaattgtcatctatgatttcataaagctggcgagtacgcctctttttcaatatacaagtttgaatgtaactctccgttcttttcttccaatttatgatcgtattatggtgttccactatacaattccagccaaattcactacacaaatatttatctatataatcttcaatgtctacatttctcttccgagatacatcaaaagaacgcacaaaatatggataatgaaaagggttacgcaatattcggtataaaccataaatcacaaggaaaatcgccattaaagctgcaacgatcaccaatacattcgacatagagctttgaaaatgatatggccactgtttcatcaccatatctcctttccacatgcaagtactatctaaaatgcgactttaatcttaaattcattatagtaaatccacctaataactgtcaagtgaaatactgctccttcatcgcaatgtgaaaacaacttgcagttgttattaaattcgcccttaacgcgcgcagtgcatttcactgcgaagcaattttacaataaccgcaggttattatttcactcgccgcaaggcaaatttcactgaaaaaggtctttgtcaaaaatgacaaagaccttttttctggtggagatggcgggaatcgaacccgcgtccgaaaaccggttaccggggctttctacgagtgtagcggctcttttgacattccctccgcgcaccgccgaacagcaggctttgcgcatcagtagcctttagatcatgacggacttaaaggcgtgggcccgttcacgtgcaccgctaagtgacgctcttatcccgtccgcggttctacgggtaagaacggctgcttaattaagcagcaacagcaactgtattgttgtcgtttaattttaagtttgcggattttatagcggtcccgcaccgctactcgcttaccagggcttccagtccccgtcgaaacctttacatccccatataaaaagcgatattgctaccgcttttatctgtttttctctttcagcgcacgctgaatatcgcgttgggcatcacgcgcggccatatcggcacgcttatcgtagagctttttgcccttgcacagaccgacctgcaccttcacccgcgaacccttaaagtacacggaaagcggaatgagcgaataaccgacggttttggaaaggccaaaaagccgcatgatctcgcgcttgtgcatgagcaaacggcgcacccgcatggggtcacggttaaagatgttgccctgctcatacgggctgatatggcagccgtttaagagcatttcaccgtccacaacagagcaccacgcgtcctttaagttgcatctgccctgccgcagcgatttcacctctgtgccgcaaagctcaatgcccgcttcaagggtctcctccacaaagtagtcgtggtaggcctttttgttctgggcaatcgttttaaattctgtttttgccacttggcctgcccccttctgctttgtgtgtgatttactatacaccactttcgcggttttgtcaacgcgaaatcgattttacagctcctgtctgccctcaatggcgcgagaaagcgtcacttcatcggcatattcgaggtcgccgccgaccgggatgccgtacgcaagacgcgttacgcggataccgagcggctttaacaggcgcgaaatgtacatggcggtcgcttcgccctcaacggtcgggttcgtcgccatgatgacctcctgcacggtgccgtcctgcacgcgacgcaaaagctcttttattttgagctgatccggcccgatgccgccaagcggcgaaatggcaccgtgcagcacgtggtaggtcgcgtggaactcatttgtgcgttccagtgcgaacacgtcgcgtgggtcttccaccacgcagataaccgagcggtctcggctttcatcgcggcacacggggcaaaggtcgccgtccgtcaaattgcagcacacggagcagtaatggatctgctcgtgcgcgtcgatgatcgcctgcgcaaagctttcggcatccgctttatccatgttgagcacggcatacgcaatgcgctgtgcggacttatgccccacgcccggcaggctctcaaatttatcgacgagccgttcgagcggcggtacgtgataaccggccattagaggatgcccggaaggctcatgccgccggagattgcgccaagcttctcctctttctcgtttgcggctgcgcgcagcgcttcgttgacagcagcagcgacgaggtcgccgagcatttcggcatcatcggggtcgatgacttccggcttaatgtcgatgttcttcacttccattttgcccgttacggttgcggaaacggctccgccgcctgcggccgcggtgtattccttcgcctcgagctccgtggtaatctgctccatctgctcctgcatcttctgtgcctggcgtgcaagctgctgcaaatttgcggctccgccgccgcccataccctgcggtaaacgtgctttcatagttaagactccttactgtgtggtttttaaatttatttttcttcgatctccacgccggcttcgcgcatatcgtgcaaaaaggcgtcgagcggatctttcggtttttcgccgtccgctgcgggcggcttataagggccgagtttatacacccgcccggtcacctgctgaatggcctcgcggatcttttctctctggctggcacgtttcaagagatcaaacgcaatctgcggcgcttcgatgagcatgtagtcgccgctgatgtacgccgctgagcccttgaacgccgacgccaccgactttgagtaattttccatatagccgataatgtccgaccagccgtcgaacggctgcgcattttttgcaagctcctctgtggactgcggcttgtcctttaccgcgggctgcacaggtgcgttgttctgtggtgtctcgggctgttgtaccggtgctgccggtgcttcagccgcggatacactcggtgccggggtgatgggacggcgcaggccgccgcgctccaaaacttcaatgcggcgcaagagtgctgcgggcgaggtatccatttccggcgtgcaaagacggataaacgtcatttccatttccgtgcgcttattcatggtcttcatgcgcgactgcgcggactggaacgcatcgagcgcgtgcagaatcgttgaaagctccatggaaagcgccgttttggtcatggcttccagctcttcgccaacggcatttacaagcccgcttgcgtccttcatcgttttgatgagcatcaaattgcgaaaaaagcccgcaagctcctcgcacagcctgcccatgtctttggaagacttatacagcgcgttgatcttttcgagtgccgcggtgcggtcgcccgtgcgaatgcactcggcgagttcaattaagtgcccacgccccgcaaggcccgccgtttccgcaacgagcccatacgtcacgtgcccgtcgctgcgaccgatgcactgatccaaaatggaaagcgcgtcgcgcatgccgccgtctgccgtaacggcgatgagcatcgcggcatcgtggtcgattgtcacattttcctgcgtgcagacccactcaaggcgccctgcgatgtcctccggtgcgatgcggcggaaatcaaaacgctgacagcgcgataaaatcgtcggcaacagcttatggacttcggtcgtcgccaaaatgaaaatgacgtgtgcgggaggttcttcgagcgtttttaagagggcattgaacgccgaaacggaaagcatgtgcacctcatcgatgatatatacgcggtatttcgccgtagtcggcgtgaagttggattcttcaatgagcgcacggatgctgtctacgccgttgttgctcgcggcgtccagctctacaacgtccaaaacagagccgtcatccagtcctctgcacacgtcgcacttgccgcatggatcgccgttttggggatccatgcaattgaccgccttcgccagaatttttgcgcaggtcgtttttcccgtgccgcgcgagccggtgaacagatatgcgtgcgaaatgcgcccggccatcagttcgttttttaacgtgaccgtcacctgcggctgaccgacgacatcggaaaactgctgcggacgatattttctgtataacgctttatacaaacggcggcgctcctttctttgtgagtgataaaagaaaaagacgcttggaacgtagaatatgtgaacggacaggcagcctgcatcgcaccagacgatccgcttaatgctgctcggtcccccgcctgacatggttcacggtgtctcgccgcgcagacctgtccgctcgcatattccacggtatattccaaccgccttggctttttccgtgcgcggaacatacttgaccgcgtactttagtattatacacgttttcccttgaaaaggcaagcaaaaaatcgtataattttgtatatgttcatatttgtaacgcgcacatgggattttttgcagattctgcgcggcaaaacgggaaaggatgaaagaaaatgaagatcagaaatgcagagctctgtgacctgccctatctgcttgagatgctagaaaacgcgaaagcttcgctgcgggcgctcggcatcgaccagtggcaaaacggctacccgaacgaaaccaccctgcgtgaggacattcaaaatagaatctgccgtgttgtgatagacgacgaaaacaatattcttgcaagtgccgccgtgtatgtgggcgacgagccgacataccacgaaatttataacggcgcgtggcagacagaaaacaaaatctacggcatcgtgcaccgcattatggcggcaaaaagcgccaagaaccgcggcgcagcatcgtttttgatgacctactgcgcgaaactctcgcttgaagcgggtgtcacctccatgcgatgcgatacgcatcccggcaacatcatcatgcagcacacgctcgaaaagaacggttacattcgctgcggcatcattcaccttacggacggcgcagaccgctttgcctacgaaaaagttctgaaataacgcacaacagacacaggccccggcgagcatgacaaaacgctcgccggggcctcgctcattctattttgttatttctttcgtccggtaaaatgacaccttgcggcatcatcgaagcacgcggctttcgtcgcgccggtcaaaatgcttacatagagatcaggccgaatgcgttcatgacagagctgataaggatgatggctgcaaagaccgggcaaagatacttgatcatcatgacgaagatcttctttctgcggaacgtgccgccttcttgcgtcatttcttcttcaatacggtctacaccgatcacgcgggaaacgagcaggcaagtcgcaatagccgcaatcggcatcataacggagttcgttaagaaatcgaagaaatcgaggaactgcatgccgagaatctttacggcatcaagcgggccgtagccgagcgaagacagcgtgccgagcacgagcatgatgatgccgataacaacggtcgactttttgcggttccaatggagttcatcttcaaacgtggaaacggcgctttccgtcagcgcaatagagcttgtgaccgccgcaaacagcacgagcacgaagaacagaatgccaaccaccgtgccgaggcccatgctggcgaacaccttcggaatcgtgatgaacatcaatgacgggcccgcctgcaaggtgttcgggtcgccgctggagaacgcaaagaccgccgggatgatcataaggccggccataatggcaatggcggtgtcgaaaatctccacattgcgtgtagagtcctcaatggacgtttcttttttcatataagagccaaacgtaacaaggatgcccatggcgatggacagcgaatagaacatctgtcccatggcggaaacgaccgtcatccaggagaaattctcaaggttcggcacaaggaaatactgaatacccttcagtgcgccgggacgtgtgacggaatagattgcgatgatgacagacaacacgacaaggatcggcatcatgaatttcgatacacgctcaataccgttgcgcacgccggcaaaaatgatggtcagcgtgatgagtgcaaaaacgataaagcaaatttcggcggacacgccgtccgagatgaacatcgaaaaatatccatcctccgcaagctttgttccgttgccgcaaatgtactcaaaaagatatttgatgacccagccgccgataacggaataataaggcacaatcaggattgggataatggcgttaatccagccgccggcttttaatgtatgcgactttgtgaacgatgcatatgcacccacagggcttttgcgcgtcatgcggccaagcgatgtttctgccacgatcatcgtgtaaccgaacgtcagcgcaagcaaaatgtagatcaaaaggaaaatgccgccgccgtattttgccgcaaggtacggaaatcgccaaatgttgccaagaccgaccgaagcgccggccgcagacagcacgaacccgagtttacccgagaacatgctgcgattactgtgatgtttcttcattacttctccacctattttctgcgaatattcaaacacagccgccggtgaaaccgttttcccccttcagtttcaccggcgtgctgcatcaatacgtttagcataccacatgggccgcaaaaatgcaatatcttgctttcacaaattcattttgcgttttctgtttatattatgccttatcatcggcgctgcgcttttttcacccagtcgagtgcgacccagccgccggctttgagacgtccccagccttttgcagaacccacacctgcgctctcctctacaaccgtatagcgcttcgtgtctgtgatctgcccctgcacgtcataattcgtacccggacccttgcggatattgagcgcatctgcagcgtccttgcgcactgtatacgctttgaacggttcatacataattttgccatttgaggcatacactttataacccacagggcatgcgtttttcgcattttccagcattgcatacgcgccgatctggctttttgcgtccgaccagcttgtccgcacgcggtaaagctgctttggcacgggtttcgcaccagtctttgtctcctttttgtcgtccttcatttcgctttcaatcattttaaaaaaccgcgcccagcccttgtcgagcgttctatgcgggcaatatttgccgtcgaagtcctgatgcttcttcacatgcgaaatatcccatttgcgctcggtgagcagctttgcgatatactccgccgcgttcttctcggctttatcgaaacgcgtgccgcccgaaagcgaatagcaaatctcgatatgaataccatgtgcattgccatcacgttggcccgctgcgaatgcgcccttgtcgagcggtatgccgatgacaatctctttgtcatcgaccgccgcgttaaacgacgtagagctgtcgttgcgaatcatatacgcgacttcatttgcggcggaagcatcgtttgccgtgttgtggacgacaatgtacttcatgtccttagcgcaggactccaccggcactttcaaatcgtattttgcagaagataatagattttcgcggatcggtaccataagatcactccttcttcccatcacttgcacccgattcatccgccacggtgcgacggagccgccttaaaatgcgctgcaaacgcggaaaccccggcacgccgatggccgcaagattttccatgacggaaatgagctcgttgatcgtaagccacacggtgacgagcatgccgaaaaacagctttacatcgagcgtgatgccggccccgatgactgcaccgcgcaaaagataatccaccgccgcaccgactgcgaccatgaccatatagcaaagctttttgagtatccccttaataccgaacttggaatttaactcggcgcggatatacgctttgatcatgccggtgatataatcgagcaacatcacgccgagcagcacgagcatcggcaccgcaagcgtaccgaggtacgacacaagtcccgcgccgagcacggccaccgtcgtctttaaaaccgtctgtttcatcaaacctttaccctccttccctgcatattgggacatgcacagcgctttgtcccgcggcatactatgacagacgcgctgcttttgtgcgcggcaatcagaaaaagcggtgaaacacgttgcggaatgtcaaaatctgtgttatgatttcggtggacaaacattcaaatatacaaaggagattttcttatggtctgcaaaaattgcggtgcaaatattccgaacggtgagcttttttgcccaaactgcggcacgtgcaccgaaaacgcgaaattctgtaaatactgcggcgcggtcatcggtgccgactgcgtggtttgccccgcatgcggcaggcaggtagagccattgcagtctgcccaacagccccagcctgtttatgtaaacaacaatgtcacttacggtggtgtggcaaaaagcaaatgggcagcgtttttcctgtgcctgtttttaggactcatcggcgcgcataaattttatgagggaaagattggcatgggtgttttgtatatcttcaccggcggcctgttcggcatcggcgcgttcgtcgatctcatcgtcatcctctgtaagcccggtccctattattacgtttaactttctcagaaaggcggcgtactatgccaagcatccttgaatatgcagaaaccgaattctcgcctttggcagaaaaaccgtttacggatgtagacagcctgcttttatcacagttttcctacatgaatctgagcgcgtttgaagacgagcttaaatgcgaaaacaaaatagaaattcgagagcttttaaaggcagagcgctttgaaaagttgatgttccacgtacgcgataccaaaagcaacatgaggcttttgtacgctatggcgtcaagcccgcgctggcgcaacataaaaatcggcaacttcgttgaaaagctgtgtgaccagtcagaggagcagtttgcggccatcactgtatacctcgatgacgaccacgcctgcgccgtattccgcggcacggacgccacgcttgtcggctggaaagaggattttaacatggcatttctgcccgtcatcccctcgcaggccgatgcggcagactatgtgacaaagctcggcgaaggttttcccggcaaactgcttttgatgggccactccaaaggcggcaaccttgcagcctacgcgggcatgttctgcgacccggaaattcaaaagcgtattgagcgcgtctacccgctcgacagccccggtttcatcggcaacacgctcgaatccgaagaatatgggcgcattcaaagccgcgtacataaagtcattccgaaaggctcgctcatcggcatgctgcttgaaaatcacggtgcatactccgttgtggaaagcaaccaaatgggcattatgcagcacgacccgttctcgtggcaggtgacggacggtgcattccatacgctggaggaaatttccagcggcgcaaaatacatgaaccaaacactcaacagctggatcaccggcatgagcatcgacgagcgcatacgccttgtcgatgtactctacggccttttgaccgccggcaatattgaaaacgtatttgacgctggcgacattcaaaagaacatcggcgctatctacaacgccgccgtgcacctcgaccccgaaacgcggtcgttcgttttgcagatcatccgtcagcttgcgggctttgcgttgcacaacatcccccacccaaacgtcccggaaaacctcaatatcctgcccggcaataaaacgcagaattaaattttcatagagtaaaagccaccgtttgcggcaagccttgcgcttcaccgtttcgatggcttttactttatgtttacgaatttgcaagctggcggcgatgagatccatgatcgtgatggaattgagctgcatcgttagcacattcatcgtgatcttgcggaatttttcagatttctcttctgcatcatccgttcccctgttttctgttttgctttatttcacgtttccgctgttgatgcccgcgcctgttctattaagcggcagccagtcgagcacctttttgatgtacgtatcccagaatacccagtcgtgcttgccggggccctccacatacgtgaggtcaacaccgttttcgttgaggaaatcacggaaatcgcggtttgcggtgacgaggccgtcctccgtgccgcagcacaggtacattttcggtacgggtctgccctcctccttcagcttcaaaagcagcgccttcgggtctttgtcgctgcccttcaccttgtcatattcaccgaaaattgactcgtaatagttgcggcggaatgtgaagatcggcgcggagttgtccgcgtccttccacgtatcgtgcacgagcgcggcggaaagaccgatgacacagccaaagttttccgcatacttcaggccgttgcggattgcaccgtagccgcccatggaaagacccgcaatgaacgtatcctcgcgcttgtcggaaagcggaaacagctttcttgtgaactctacaagctccttgccgatgaactcgccgtacagctcgccgctcttttcgtcgtcgaggtagaagcggttttcaccggagggcataatgaccgcaaggtcgtttgcctctgcccacgcctgaatgcgcgtgccgttcacccagtccgtataattgccgaaaataccgtgcaaaaggtaaagcgtcttcagcggcttctgctctgcgttttccgcctgcgggccgaacttatccaccgggataatcgcattgaacgtcaccacgcgcatgaggcacttcgagataaaattcacttcaataatagccatatcaacaactccgtttcaattttggtttcgttatatttcattataatcaataaaaacccttttgtaaagactacttttatgctatactgtacaaaacggtttgaaagcaaaggaagttgaatacgatgaacgatttttccgagcgcgtgtttcaggtggtgcgcgagatcccgcgcggcaaggtgacaaattacggcttcgtggcatttgcggcgggcaacccgcgggcctcgcgcggcgtgggctttgtgctgcaccgcaacacggaccccgtaaatacgccatgccaccgcgtagtgttcaaagacggctctctgtgcaagggctacgttttcggcggccccgatgtacagcgcgaaaagctcgaagccgagggcgtgcagttcctgcccgacggccgcgtagacatgaaagcctgcggctggttcggcgaaaacgaagaataacaaaaaggtgcctgaccaaaatgatcaagcacctttcgtttttacttttaaaatcagccgtagttcttaaagctgacgttaatatcgactgccgcgtcgatgccctgcacctgcgcgttgtcggaatactgccacaggccgaagttatagtagaacgccggcacgctgcggtattccgcaagccagaactcaaagtccttgagctgctctaagtcataatagttatagccaagactgcggttgaagtacacacctgcggtgtagcccgctttcgcgatttttttgcagaacgccgaagcataactcgtaatctgctcgcccgtggcatctgccgtgcgagagccgtctacgctcgtctgctcccagtcaaagacgacggggtaatcgacggacttattctgcaaaagctggagcacatagcccgcttcctcctccgcttcggtaacagaagttgcctgcgagaagaagtagatgcccacctttacgcctgcgtccttcgcaccggtgtaattatcggcaaacttgctgtcttcgttcagcttgccgcgcgttgcaccgcggtagcctgcgcggatcatcgcgaaatcgatgccgctcgctttgacggctgcccagtcgatatcgccctgatagtcggaaacgtcgatgccgaggctcgcgttcgcgtcgtcatacgtcacaaggccgttgtcatttttaaacttcgactggtcgtatgtattgagcggcacattaaacttcggaatggtgatctcaccctcgtaaagatcctgaatgacaagcttgccgtcctccgtcaccgcggaagatgtgccgttgccggtgctctgcccgtcggatttcccgccgaacgcggataggagcgataaaatgaccacgaccagaatgagcacgccggccgcgccaaggaaaatcaaacggcgcatttcaaaagaacgcgcgtcgctatgtttatttggagctttattattcatagtaaaattacctttcataaacgaaatcacagcgtaaactgcacaccgtgttcggatttattctattatacgcattttctgtcctttttgcaagccattcggcgaataaagtctgccttgccaagtatttcccactgccatctcgtggtctatcgtaccgagtacgcggattttatcgcggctccacaggggtgcaagcagctttgttttgtcaccgtcgcccgtaatgcgttcgatgaccgtttcgggcggcagcacctccagttgacggattacgacgcgcacatagtcctcaaacgtcatcggcgtgtatgcgccgctttcgtataagcccgcaagctgcgtgccgcgaatgacgtgtaaaagatgaattttcacaccgtccgggcgcagctgtgcaaggtcttcggcggtctttatcatctccgcctccgtctcgcccggtaagccgtctatgatatgcacgcaaacgcgaatattgttttcgcgcaggcgcagaaatatctctctaaatacctcgtatttatatcctctgtgaatacgcgcagccgtctcatcattactgctttgcaggcccagttccacggtgaggtgcgttttgccgttcaattcttttaaaagcgacaaaacatccttcccgatgcagtccgggcgcgtggcaatcgacacaccgtaaacgccgaatgcaagcgcttcttcgtataacgtcctgagcttttcaaccggcgcataggtgtttgtgtgcgtctgaaaatacgcgatgattttactttccggcgactttttatgaatacgcactttttccgcttgcagctgctccgttacggaaaatgccttatcctgcgtaaaatagccgctgccgccgtcgcagaagatgcacccgcccacgccgcacgtgccgtctatgttcgggcagctcagcccggcatcgatcacggccttttgggtcttgcaattctgcacccggttgtgataagctaatgtatgataccgtttgttatcaaacgtatacggaaatggattcaaagtaaagctcctttgcttggtccaaaataataataggagttgagtatttgttacacattaaaaagctgaatttagacgaaattcgcgaaatttacaacgcatatatgcacgaggcattcccgccgagcgagctgcgcccctttgcaagcatggaaatgctctacaataaaaactgctacccgtgttacggcttttacgacgaaaccgattcactctgcgcctacgcctatttttcgtgcacggaaaacggcaaatacgccctgcttgattatttcgccgtcaaaaaagacctgcgcggcacgggcatcggcagcaagacttttcccctgctgcgcacagaaatgaaagaccgtgacggtcttttgctcgaagtggaaagcgttgagagcgccgaagccgaagaagaagtcaacatccgtcgccgccgcatcgcgttttatgagcgctgcgggtgcgaaatgacaaaagcaaaaagccttttgtacggcgtggatttcaatatacttgtgctgcccatcgcgcagcccgtaccggaagcgaaagtcgtgctgcatgagctcgaaaacatttatcacgttatgttcgacgacgagctgtataagcgcgtctgtcacccgtttatcgcggaataggcagatttttgaattgactttttcgcacaaaagccatataataaagccataaaccatacggaggtgtaagcatgccggaagaacagaaaacagcagaaaccgaacaggagcgccttgcggattttccgcgtgatctaagccgcagcttcacctatctgcaccgccagcgtaaaaaatatatggatgaccgtctgcgcggctacggctttgtaggtggcatgccgatgatcctgctctacatcaaccgccaccccggcaccacgcaggacgccatcgtctcgcatatgtatatcgacaaatgcaccgtagcacgccgcacaaaacgccttgaagagctcggctacatttcgcgcgaaaccggcaaggaagatcgccgcgaaaacaacctctacgtcacagaaagcggcgaaaatctcgtgcccgtcatccgcgagattttgcaggattgggccaaaagcgtcacgcgcgacctttccgatgaagagcgcattttactcatcacactgttagaccgcctcatccatacggacgtggagtaaaatttcacttgatatggactaccccgcagttttaaagctgcggggtgtttttcattgaaaaagctccgggaagcacgccttttgttccgccgaaaaatccgtctcgaccgttttatcgatgtcgagcgccgggcataaaagatgcactgcacggcagcagagcatctggtgctccgttctgtccaaatgcccgccgtaaaggtcgtcccccgccacgggatgcccaaggtgcgccatgtgcacgcgaatctggtgcgtgcgcccggttttcaaatggaagtcaacgaggctgtacccgccgctcgttctcaccgtttgaaattccgtcacggcttcgtctccgatgcccgcgcagcgctccaccttatgccccagctttaacccgatgggcacattcacacacccgctttcgggcgtttcgccctcgcacacggcgcggtacattttcgtcagctttgcgtttgcggcaaatttgtttttcgccagcaccagcgcgccggtcgtatcccggtctaagcggtacaacggccgaaacacaaagtccggcgtattttgaaaataccacgccgccgcatttaaaacgctgtcgcggtcgtgccccggcgaggggtgcacgggcatattgtacggcttatcgagcactaaaaaatcctcgtcctcatataaaaccgcaaacggcaggtcggctttttcatacgcttcgcccgtctcaagcagcgtcaaagtcagcgtatcgccggctttcaaaacggcattgctgtgcacgggttcgccgtttttaagcatctctccctcgtatttcagcgccgttaaaatgcgtgcggaaaaccctaagtaccgccgcacgaacgtacgcacgtccatgttttcctgtccgcagtcgatgacgaactccagtgtgcgtttcattacttgctgcgcgttgcgagcttttccgcaaactcgtgcaggaacgtgctgtccgcgtcaaacgcgtcaagcgcatgaagcgtcttttcggtatgctcatcgacgagcgcctgtgctttttccacgcccaaaatggaaacatacgtgcagcgcgcgttttgtgcatccacgccgatgttcttgccaagctccttggcgtcaccggtcacgtccagaatatcgtcgcggatctggaacgccaaaccgatgtgcagcgcgtattcctttgctgcattgatctgcgtttcgttcgcccccgccgcaatgcaacccatcatgcatgctgccatgatgaggtttgcggtcttgccggtgtctttttcgcacagctcatcgagcgaaacggtgcggttttcggttgcaaggtcaatgcactggccgcccaccataccgtactcacccgcgcaacgcgcaagcaccgccgccgcatacgcagcgcgctccatgccgacatttcggaatgcttcactgctcagcgccgtttcaaatgcttttgtcaaaaggccgtcgcccgcaagcaatgcgtaattttcaccgtagaccttgtggttagagggcttaccgcggcgcatatcgtcgttatccatgcacggcagatcgtcgtggatgagcgaatacgcgtgtaccatctccacggcacacgcaaacggcatcgccatgtcttcatcgccgccgcacagctcgcagaacgcaagcgttaaaacggcgcgcacacgcttgccgccgtttaaaagcgaatagcgcatggcgtcggtcacggtctcggaaagcgagcccttgcgctccggcaaaaaatgatctaaggctttttcaatgcgttttaccctgtcttccatttttattcctccgttttcgcagcactcagctccgtaattttctgttcggcagtgtttaatttctcatagcaaaagcgggaaagctccgcgccctcgctaaaaagcttcacagattcctccagtgtcacatctcccttttcgagcgtctcggtcacctcgcgaaggcgcagcatcgcgtcttcaaaggtcatggtttttttaggcatcggtcatttccctcttttctgttttctgcacctgcacggtgatcgcgccgtcctctacgcgcgctgtcaaaacgtcgcccggctttgcgtcttccgtgcgctttatcactttcccgttttcgtcggacacgatcgcgtatccgcgtgaaagcaccttcagcgggctcattgcgtctaaccgtgcggaaagcgcagcaagctcgtttttctcattcagaattctgcgctcggcgctgtgcgtcaggctctgcaccgtgtttcggagcgcctgcctacgcggtgaaagccacgcggacgggttttgcagcacgtttgcgcttgcaagcgcatcgagcatctgccgccgatcgtcaagccccgcctgcacgctgccgcacaaacggcgcgtcagctgcgcaagtgccgcacgcatttcttccctgtccggcacggcaagctctgccgccgcgctcggcgttggcgctctcaagtccgcgacaaaatcgcaaatcgtaaaatccgtctcgtgtcccacagcggagatgacgggtatcttcgacgcaaacactgcccttgcgagcgtctcgtcgttgaatgcgaccaaatcctccgcggagccgccgccgcgcccgatgatgatgacatccgccgccttttgggcgttcatcaatttcaccgccgccgtaagctgcgccgctgcgtcctcgccctgcacaagcaccgggcaaaacacaatctccgccgcaggccagcgccgcgagagtatgttgcgaatatcctgcaccgccgcgcccgtcggtgacgtgatgacgccgatgcgcgctggaaacggcgggatcggccgcttgtgttcttccgcgaacagtccctcggcagcaagcttttctttcagctgctcaaacgctaagctcagcgcgcccacgccgtccggctgcatttcctccacatagaattggtactgcccgccgggctcatacacggccacacgcccgcgcacgataacgcgcatgccctctttcgggcaaaaacgcagccgccgcgcggcagacgaaaacataaccgccttcaaaacggacttttcgtctttcagcgaaaaatacaggtgtccggagcggtagtgatcggtaaaattggaaatttcgccgcgcgcgtaaatatcgcgcatgcggccgtcaccctcaataagcgactttataaaaaaattgatctgcgaaaccgataaaacgcgcatatcaggcctcctgcgaaagtgacgccaaaacggcgatgccggcagcgttatccgccgaaaagcgcggctctgcaaacagtgcgccgtacttttcgctcatgtgcgcacgcagcatggagtttgaagacacgccgcccgaaaacaccacgggcaaatcgccgaatgtctcgataagcgccttacacatcgcgtccgatgccgcaatgacatacgccatgcacgtcgcggcgatttcctccttcggcgcaccctttttcatcagctcgcggcatttattttccacaccggaaagcgagcagttcgcgcctttcatcgaagcacgcacgcgcagtctttccgtataattgcacgcaatggggtctaaatgcttgccagccggaaacggcagaccgagcatcacgccgatgcggtcaatgacctgcccggcctttaaatcgagtgaagacgcaacaaggcgcgtgcgaaacattttgtcaccctccacaggttctaccaaaaccgcttccgttgtgccgccggacatgtgaaacgccaaaaaacgctcgtgcagcaagtccagtcgttgggcagagtaaagcgccgccgcaatgtgcccctgctggtgcgaaaagcgccgcagcggcacccctaacgcctgcgcaagcatctgcgccgcgccgatgccgaccaagaagcacggcatataggagtccttcgcatcacgcgggcgctccgaaacgccaatgaccttcgcctcgctaatcttatcaccgagcatggacagcacctccggcagctggcgcgtgtggtggaacaccgcgtcgctctggcgcagtccgatctcgccctctttcacaggcaaaatcatgccgcggctgtccatttcgccgtcgccgaaaaacgcggcgctcgttgtgtagttgctggtgtctaaaccgagcgcgctgatgttaggcattttcgctctccgtctcgttcttcgctccctcaagcttctttgcaattgtggaaagcacgccgtttacgtaagaagcgtccttttcgttgccgtaaatttttgcaagctccaccgcctcgttgatggaaacgctcaccgggacatcgtcggcccgcataaactgcatttcgcacacggcaacgcgcaaaatcgtcagcgtcattttagaaagacggcgcaaactccaaccgcgcagattttcttcgatcgtgtggtcgatctcgtctaaataaagttccgtcaaagcggtcagcttttcgcagtacggatcgataacgacatcgcgcgcttccttcgccatttcaatgatgtcttccatgctgtcgcccgtcacggtcttttcaaaaagcagcgtaaaagcctgttctctcgattctcttcttttcgtcatactcggttcctttcccttatctcaataaaattcattgcgtaattcatggcggatataaacaaaaaagcccgccgaaggatcggcaggcaatttgagcagaaatcaggcactttcgggtttcaccggtgccgtttgatgtgcagttttcaagctccagacatacacgccgatatgttctggaatagtataccacgataaacggtaaaatgcaagaaatcatcttttatttcgccgcagaaatgatcttcacgttttccgcgctgacgccgctttcggaaactgcaatgtcccgcacgatgagcgcgttctgttcgtcctccatgtcgccgtttacaaccaccgtgcagctctcgccgttgatgtacgccacgcactccgtaaagcccttcgcttctatgagggactctatgtttgtctctttcaaaatgttctgcgcgataaccgcggcttcgtccacggcggcctgctttacggcgacctcggcgctgtcgtctttcaggatgtcctccagcagctccacggcctcatcccgtgcggtctggcgcgtcaagcgggcgtccgaaagttttgcggaagccgataccgcagccgctgtttcttctgccgcgctgctttccgtcgcaccatctgcgggctccgtttccggcagaacaccgtcctcgttcataagcgtgtcggagaccgtctccacataggcgttgttcacaagctgcgccgcaccgagagcggaagacgcactttcctcgctgacatcgcccgcgctctgcacctttgtacccgcaaactgccaatttaagtacactgccgcaccaagggccagcacaagcgatgccaagatcagctgtcttttaccgtatttcattccgtgttcctccgatcttcactgaatggtttcattcgttgccatatgtatattcgctgtaccccaccacgcatacctgcgtagaggataaatcgagcgcagtcttcacggcctccacaatcttctcccgcattttcgggtcgcctcccccgcggctcacgactaccacgccgcggatctccggctccgttttcgtcacgatgagcggcttctgcgagccgtccgccgccttcaccaggatatacgtcttctgcgtgtcgccgtccgtctgcgtgcggttgaggctttcgccgctgtactcctcggcgcttttttcgctctgcttatcttcggtcgcatacatcgtttcgcccattgtacgcagcgtcaccgtcacctgcggctcgctttcccccgtgatagccgagaccatctgcgcgatctgcgcggaaagcgctctggtgtagtctcctgccgtcagttccaccgtctccggcgcttcattttccgtgttctttgtgtccataggccataggagcatcaataaaacgagcgccgcgcaggctgcaatgagcatatacgtcagcttaccgtttttcaaaaggcttttcagtttatccgtctcgcctcacctcctacacgtacacatccaccgggatggcctcggtcagcacgctgcgcaaaagcgcgtccgcgcggtcgatgtctgtcgcaaaccgcacccgtacccgcacacgttccaccgtcaccgcgccgtcatcgtcctgtgtgtaccaaatgtcgatattcgctgccggcacgtccatccccgcacttttcaaaagcgccgagagccgctctttcaaaatcgccgtgcccttttccgcgtagctttgcgttatcgtcgattcggcttcgcccgtttcggtcaagtcaaaatcgagcgagaccccgctttgcagctttaaaatgccgtttacaagcaccacaagcagcatcagcgctgcaagcgcgtggataagtgacccgcttttttccgggaacagccgcacgatcatctccgtcccgatgagcaccatgcacaccgaaaacaccagcgcatacaattcacgcataagcacctcgcacacaaagcaccacagccgccgagaccaccgccaccgcacccacactacataccgccgcaatgagcagccgcagcgccgcagcacagccgtttaaaaacgacgcaagcggctttagacccaacacctctgccgtaagccccgcgcaaaagcaaatcaaaagccacgcggcagcctttatgcacagcggcagaaaaatcgcgagtgatgcaagcaacccaaatgcccccacgccgttttttacaagcgccgcgccggaaacgatgaccgaaaacgcatcggaaaacgcgctgcccacaatggggatcgcgccggagacaagcattttcgctgccttgccgcccgccatctccgcgctgttcgcaacaattgtctgtacggacaaaacgcccgtatataccgtgacggcgagcaccaaagcccatttgatagctttatacagcgcgtccgtcagccgctttaaatcaaacgatgtcacggcagaagccacggaaaacgccaaaaacacacgcaaaaccgggatgagcaccgcgctgctcaaaaccgagacggcatttgccgccgtaagcgacagcgcgccgtaggtcggtgctgtcacggtgttccccgccgtgaaaagcagccccgcatacacgggcaccgcggcaagcagaaaaacggcagcagcatccgtcacgcgcgcggcctgctccaaaagcgaagccatcggcgaaaacagcgtcacggcggcgcacagcgccccgcatacggaaacggcgtaggaaagctcctttgcggcgaattcctgcacaagtctgcacagcacgcatgatgcaagcagcgtaaggagtgcccgcgccggtgctgtccactccgcacgaaagccctcggaaagcgccgaaaacagctttgtcgccgcgtcgggcgcaggtgtttccatcgggtcggccccgacgttctgcaaaagcgactgtgcttcttccggcagcgcctccataagtgtatccgccccgctgttttggtagagttccgcttcgtccgcgcgcacgggcagcgaaagtagcaggataaacaccgtcaaagccaaaaaaacgcgcaaaatccgttttttcataacaacagcacttcctgcaaaagcgagagaagtcgattcagcaacggcagcgccgtcagcagcaccgctgtttttacggcaagctccacaccgcttgctattgccgattcccccgcgtccttacaaagatctgccgttatgcgcccgatgagcacgatgccgagcgcttttaacagcgctccgaacacctccggcatgccggaaagctccgcccattcgcggaatgtcgaagtcagcgtttcaatctgcggcaaaacacacagaaaaacgagcaccgccgccgcaagtgaaaacagcagagctatttccttttgcccgcgttttaaaagcgcgccgcacaccgctgcaaacaccgccgctgccgataccgtaagcaccgtgctcatagcccaaacaccgatttgatcgtatcgaacagcgtgctgatctgcgtgataagcatcgtcaacaccacgatgagccccgcaagcgtcgtcatcatagcctgctcctcccgcccggagcgaatgagcagctggttcaaaacggccacaagtatgccgatggcggcgatcttgaagatcagatctacatccatagctttgctttcctttccggctgttacagcaaaatgagggcggcggaaacgccgacaaatagccccagcgccacgcacaatctgcctttctgggcaaggctttgctcggcggctaaaagtgcgctgcgcacgcggccttcatgcagcgcaaagtacgccatttgcccatcgaggtcggtcttgccgaacccgtcgataaacgcggcgcacagcgcttcatctccacggtatgtaaaaaacgcatgtgccgccgctttaaacgccgctgtgcaatccatgttttcagaaagcacccacacgcgccccaaaaaagcattttcgcggcacagagagagcagcgcgtacaggtcgcccgccgtataggccgcggcgtttttcaacgcaaaaagcgcttccaaaaagatgttcagttctttttcacgcatttttagccgcgcagataccgatgacccggcggtcgccgcgcacagaacaatcaggatcgccgccgttgttttcaagaagatcacccgccaaaaacagcttttccactttcgtcggtgcacttcgcccgtgcagcagtgccaccgtttcaaacgcgccgagcgacagaatcccgcggcacagcggtctgcaacacagttcgtgtacactgcccgcgtggatgctcgcaatcagcgccacccctgaaaacgatgccgcacgtatcgccgaaaaatcgttttcaccgagctcatcgcagacgatgtactccggtgaaagacaccgcaccgcgtgcgaaagcccctcctgcttcgggtagccctgcaaaatatccgtgcacgcgccgagatcaaacccgtccgcactcagctcaaaccgctcgtcaagcaccaccacgcgatgccccgccgtaccgatatatcgtgcaatatcccgcagcagcgtcgttttgcccgaggacggcgcgccagcaagcagcagcccgcggctgaggtctacgccgtagcgcagcacctcctctgcacagccgcgcttctctcgcgggatacgcacagaaagactcgtcacgtcgcgcaccgttttgatgccgcccttttcgatcaccgccgtaccgccgatgcccacccgcaacgcgcggtctgcggagacgaatccgccgcgaatctcctccatgtgactgtaaacggaatacccgcacagccgcaaaaagatctcctccacgtcctcgcgtgtcgctgtcacattgttttgcgaaaaatactgcgccgtgtcgccgtcttcccgcaaaaacaaaatgcggtcaccgcagcacagcagcacaggcttatccacactgatacgaatgtcaaacaccgcgtcgcgcaccgcctgcggcaccttttcaagcatcggtgtaaagcgcccgagcgggcggatcgccttttcaaaatccatcgcacacacctttctttccgctccgtatgcccaattctatggacgtgccgccgggtttagaaccaaagtggaaaaaaagggccatcgccctttttataaacgtgcctttatgcctttgaaaagtgtgcccgaaatccgccgcgatttttcaaacatgaaaagcaccctgcaaggtcaaaagctttacaaggtgctttctctatggagcaagctatttactttggaagtccgctttgatacaagctgtaaaagtgatttgtcggccccgcgccgtgcccgagctcgagcgcgtgctcgatggcgcacgtcatgtagtctttcgcacgtttcaccgcttcagcgggtgcatatccaagcgccaaattcgaggcaatagcggaagacagcgtgcaccctgtgccgtgcgtgttcttcgtttgaatgcgattcgctgtaaagcttatatgctgttcaccatcgaacagaatatcgatcgggtcgcctgcaaagtgtcctccctttacaagcacagctttacagcccattgtgtaaatcaactttgctgcagcacacatatcgtcttccgtctcaatgtgcatcccggtgatttcctccgcctcgggaatattcggtgtcagcacgtcggcgagcggcaaaatttccgctttgaatgtctcaatcgactgcggagccatcagtgccgttccgtctttcgcatacatcacagggtcaacaacgacgttcttcggacagtatttgcgcagcttttccgccacagcagacatcacctccggcgtcggcagcatgccaatcttcacggcgtccgtaccgatatcttcatagattgcgtccacctgcgcgcggacaatctccggcgcaatatcctgctttttcagcacatgcacggtgttttctgccacaacggacacgatcacgctcatcgcgtacacgccgtgtgcggacattgtcttgatatccgcctgaatacccgcgccgccggagcaatccgacccggcgatggtcagcacgcgcttcattgcactcatcacagcgaaagctcggaaactgtgaggttctgcacctcaacgggatcctcggcgtggatcgtgaacgtcggcttcgtctcatccagcacatgcgcgatgaccgtgtttgcaacgccgttcaaataaatctctacgctgtttgtatcggtaatgatgtccaccttcatcggctcgtttttcaggcgcggcaatatggattctccgcaggtcagaccgtttttgtcgagcttcatctcaaggccgtacaagttgcatgtaaggtcgccttcctttacagtaaaggagatgcggcaggtcttgctgccgagctcgtgcgtgcagtgtgtcaatgtaaagtcatcaagcttgtcagattttacaaccagattttctgtgctcttgatcggcagcgcagagagatagtagcggtcgccgtgctttttcagcgtcatttcggtcggcgtacacatggagccgttgaacggtgcgccgggaatatcgctgcggttccacgcaaagcggatgaccggcttgcccggctcgtagtaatacgtctgcgccgcatacgactgcgagttatacgaaagctgcccgaccgactgaatcggctggtaaaggccgttttcatcaaaatcaccgacaaaatacatgtcatgcgcaccggaatagacccacagcgttctgccgtcatctgctgtaagcggatagagatccgggcactcgtcatcaccgggcaggtcaaatttctgcaaaagctcccagtgcagtaagtcctgcgacgtgaagattgcgtaggtgcgctccacaaaatacagtgccatcagccagcgcgcgcgctttgcgtcgtaaataaccttcgggtcgcggttgccgggtgcaatctcgtcgatcagcggatttttgtcatactttttcagcgttttaccgccgtctgtgctgtacgcaaggcactgtgtgctctttttttcgcccgcgcaggtgtaaaagaacaagattggcgtttcatcgccttctttgaggccggaaacattgttgtgatcgactaccgcacagccggaaaacattgcgccatccatgtcaaggaacatcgcttcctccttatattcccagtggaaaagatccgagctcacggcgtggccccaatgcatgttgccccacagtctgccgtagggattgtgctggtagaaaaggtgatactgtccgccgtaaaagcacagaccgttcggatcgttgatccagccgcgctccgctgtaaagtgcagctgcgggcgcaagacggtctcttccgccgtaagcggcgtcatagcatcctcaaacaccggcgtaaatgcgcactccggctccaccgtgacagtcatcgtcttaccaaggtaatcgcgcaggtcggcataataaatcgcatctgcgttttcttccgtataaacggcatcgaacttataaaccggtgtgccgttttcagaaaaagtaaatttttgcgaagtgccgtcaaatttcaccggcacgcgtagaaaacgtttgctgactgtaatttccataaattcaagctcctttagccgttatcggtgcattaaaatgcatgcaccacatttattcgaggatattgtagcacaccgcgcgaaaaatgtcatgcatattttgcttaaatttgcgaatttttccgccgcgcaaagccaaactatgtgcgctgcagatgtgtaaaggaaaggcggtgcaaaggtggcaaaacacatttggaaatttgtaaaaagccaaaagatatttatcatattactaatatcatatacagttgtctttgttttggcggttcgatttatttttcatattctcccgattttgcttggcgggttgcttggatgggtcacaacaccgctatgccgcctgctggaaaaacggctgcatctctcccataagcgcgccgcactttgcactgctgtcgccgtttataccgtttcactcgtccttcttgcattgcttttcacgcggctcatccgggaaagcgccgcgttttttgcttccgggcgatactttcgctacgaagcacttgcccccgccgtgcggtcgtttttggagcgcacatggcaggaattgccgcagtggatctccgctgcgcagaagaatttttcgggtaacatgggtgccgccatgcccgcgctgcaaggtaccgtaaaggcgattttgctgctgcctgccgtgtttttaacgctcacgctcatcccggtttttgcgtatctcaccctgctgtaccgtgaaaatttgctgtctcttttaaaaaagctcatcggtgaaaagtgcgtagaaaacctgcaaaaatccgcaaaaagcgaatcttccgtcgggtttgtttccgcctatgcactcatttacaccatcacgtttgcggaaagttttgtgatgctccacctgctgcgcatgaaatacccgctgatgactgccgccgttgtgacggtctccgatattttcccggtctttgggccgggaaccgttttgctgccgctcgccgtttaccgattgttatgcggcagcgcggcgcaagcactcgggctcttcatcgggtggatcattctaagcgtcatccggcagattattgagccgaagctgctcgccaaaatgacgcgcaccccgcctgccgtgatgcttttcgctgtgtattgcagccttatcagccgcaatttttggctcatcccctacaccggcacctttttcatgctgattggcatgttgagaaaagccggaatactaacagcaaaatcagaatcaatatagattaaaaatcgcaaatttgcaaaagcaaaatccaaaaataccattttaaaattattgtattttgataaaaatacattcaaaaatcgaaagtccgtcaatcatctgcttccgttttcataaagccttctaaaatgcgcaaacactcctgcgtgttttgacccaagatttcctgtatcttcttgaaatcacgcgctttgtgcatgacgttttgcagcttgaaaaactcttccttgccgtgcttatgaatgaacagcgcctgcgccttggcagcggctgtacgtcgtcaagcggcgcaagcgtgcaaaacgagtttgtcttctgccaacatcaaaacttacgttcggagtcaaagcgattttgaaaagatgtccgcttttatgcaaaagagcaagggaaggacggtctatccctctcttgctctgtattttgtataaaaattttacgcgttcagcagcttttctgcagcggcaagcttgatggagcaacagaaaacttccatggcttgttcgagctcttcaagcggcgggaacgacggcgcaagacgaatgttactgtcgtgcgggtctttgccgtacgggaacgtcgcaccggcatcggtcaggatgacgcccgcttctttacacagctgcacgacgcgctttgcgcagccgtcaagcacatcgacgctgatgaaatagccaccgttcggcttattccactcggcgacaccgaggtcgccgacattttcctccaacatcagctcgcacaggcggaacttcggttccaaaatggcgcggtggcccttcatgagggcgcgtacaccgttgatgtcgtgcaggaacagcacgtggcgcagctgattcagcttatccgggccgatggtagacgtgagcgtgtgctccttgaaatcgcggatattgttatcgctcgtggcgaggccggccacaccggcgcccgggaacgagatcttggacgtagaggcaaaaatgaagatctgatcttctgtgccgttttcaacgcagagatcgtagatattgagcagcgtatccggcgtatcggtgaggtcatgcacacaataggcgttatcccacatgattttgaagtcctttgcagccggttttaatgcggcgaaacggcggacagtctcatcggaatacgtgacacccgtggggttcgaatacttcggcacacaccaaatgcccttaatggagtcatcgtccttgacgagcttttcgatgagatccatatccgggccggtagcatacatcgggatgttgatgagctcgaagccgtaatactccgttacggcaaaatggcggtcgtagccaggcaccggacagagaaactttttcttatccagcttgcaccacggcgtgcagccgttgtagccgtgcgagaagccgcgggaaataacctcaaacatcatcatcaagcttgagttgttgccgagaataacctgcgaagccggtacgccgaccatatcggcgaaaatgcgtttcatctccggcagaccgtcccaaagaccgtagttacggcagtcatcaccgttggaattcgcaaattcgcttctcgctttcagcgcttccaaaacgccgagggcgagctccagctgttttgcgctgggcttgccgcgcgccatgttcagcgaaagatttttggcctgatagcccttatattctgcggaaagctcatcgaaaaccttctgtaattctgctttgctcaagtttgcgtacgccacgaaaacatctccataaataagattttgaattgaaaaataagcattcaattcatttttacgctccaatagcgcctgaaacaattcttattgtaatacaaataagctaaaaatgcaagccttatttataaatcttgcatttttcccgttttgcacgattgtacgacgtgttttcctgcttttccgttcattctgacaagtgtataacaaagcaaaaaccggcacagcgaactgtaccggcaaaagacttgcttttatgaaatttagaactccgcagagcccgttgtgcgcgggaacggcagtacgtcgcggatattggagatgcccgtaaggtacatgaccatgcgctcgaagccgagaccgaagcccgcatgcttgttgccgccgaaacggcgaaggtcgaggtaccaccagtaatcctcctcgttaaggccgagctcgcgaatacggttcagaagcacgtcgtagcgctcttctctctggcttgcgccgcacagctcgccgatgcccggcacgagcagatcggtcgccgcaacggttttgttgtcgtcattgaggcgcatgtagaacgccttgatctccttcgggtaatcggtgacgaacaccggcttgccgaactctttttcggtgaggtagcgctcgtgctcggtctggaggtcgcagccccaggagaccttatattcaaagttgtcgttgttcttttcaaggagctttacggcatccgtataggaaatgcggacgaaatcggagtttgccacatgctccagacgctctttgaggcccttatcgacaaactggttgaagaagtcgatgtcctgcgggcagcacgccataacgtctttgatgatgtacttgatcatggcctccatgagatccatgtcgtcgttgagatcggcaaacgcgatctccggctcgaccatccagaactctgccgcgtgacgctgcgtataagagcgctctgcgcggaacgtggggccgaacgtatagaccttaccgaacgccatggccatgcactccgcctcaagctggccggaaacggtgagggacgtctgcttgccgaagaaatccttgctgtaatcgaccgtgccgtcctcgtttttcggaacattgacgaggtcgagcgttgtcagctggaacatctcgcccgcgccctcgcagtcactgcccgtgacaatcggcgtatgcacataggtgaagccgttctcgttgaagaacttatggatggcgaacgccgcagcggaacgcacgcggaacgctgcgttgaagaggttcgttctcgggcgcaggtgcgcgaccgtacgcaggtattccaccgtgtggcgcttcttctgaagcggatattccggcgaggacgcaccctcaacggtaatctcctccgcctgaatttcaaaaggctgcttcgcttccggcgtgagcagcaacgtaccggtgacacgcagcgcagcgccgacattctgggaagcgatctccttgtaattttcgagtttttccgccgtaaagacgatctgtacgcccttaaagcagctgccgtcattcagatcgataaatccgagcgctttggagtcgcggatcgatctcgcccagccacagaccgtgacctgcgtatcgccaaaggtctccggcgatccgtagagggccgcgatttctgttcttttcatgatgaccacattcctttccgtgcggcacttaaactgcacacgcaaaacctacgctttggcatgcggcatttctccgcaaataatcacttttattatcatactacaaacgctatcggtttagcaaggaaaattttgaattttctccctgaaaacgcgatttatgcgcgatctttcttcaaaatcgcataatttgcgatgtcgcacagtcccccattgttctttgcaccctcgcgcatgatgccctcaaactgcatgccgcactttttcatcacgccgccggagtgcgagttattcacatcatggcgcgccgcaatgcggttgaggccgacctcgtcaaacaggaaattaatcacggcaccgagtgcttcgctcgtatagcccttgtgccaccagttttggccgatgcagtagccgatctctgccgctttgatctcatcatccgtttttaccgcagcgatagtaccgataagcgcgtttccatcctttacaacaatgccccactggtaatagttgagctcctcatagtgcgatgcccacaacgcgaggatctgctttgttacctctacgctgctgtgcgtgggccatgtgaggaactttgtgaccccagggtcggacgcccagttgcggtacatcggctctgcgtccgcaagcgttaaacggcgcaaaatgagccttggcgtttcgagtgtgacagtccccttgtgttccattgtgtttcctcctgatttctcctgaaaataaaacagtgcagaccgttcattcagcctgcactgttcattgcgatttatgcggttaggttctttctaactctcaaaaagcgtatgacaatgtaggcccgcagcaagtaccgttatccatggcatttgcggactgcatattcatcataacgcggacaaagcggaacattgtcatacccctctctttcaaatttgttttgactatcctaccacagttttttcggttttgcaagaggaaaattctattttcctgaaattctccggaaaatcagcccaaaggcgcgtgtttgagcagtccgcagtccttttcgccgtaaaagcgcacaacattgatgcgaatgttcacctcatcgctcgggtcctgcctctgtgctttatcgagcagtaaagcgcgcgaatacgcaaaaagagaacgaccgcagccgttctcccgatgttaaaagtaaaagggacagaaagattgcactctctgtccccctttattcaagattgcgactaaacctataagccgagttctgtcttggacaaccatctttctcgtctgcacgttgccgtgcagctcaagccatctcctcgaaaccgccgggccgacgtatatgtttctccacgatgttgctccgaatagggtttacatggccgcgcagtctcctgcgcgccggtgcgctcttaccgcacctttccacccttacctgcaatgcaggcggtatatctctgttgcactttccctggggtcgcccccggcggccgttagccgttattctcgccctgtggagctcggactttcctcagatgcggcctttcggcgtacacccgcagctgtccggcttactcgcaaaatttgtgaaatgattggattttaatactggttttcggaaagcaagcgatttttctcgtcccacagcttctgagaaaggtccacatagtagctgtgcgggttttcaaatcgcgttacttcttcccacagcgtatcgacctgcgcgaggcaatgcgcgcggatagcgcttaaggcacgcggctgatacaggcactcgccgtttttaaacagctgggtgcgcaggcgcacggcgcggaaattctccacagtcttgcgcttccacgtgtgattcgggtcgaagatcgtatacggcttctcgtcatcgatgacctcgtcgttcagcgtgatgacatccgcaatggccttgtcggtctcgcggtcaaaaatacgccaaacctccttgaagcacggtgtggtgatctttgctacgttttcgctgatcttgatcttcggaacgatagtgccgtccggtttttcaacagccgccagcttataaacgccgccgaacaccggctcgctggaagacgtgatgagacgctcgcctacgccgaaagaatcaacctttgcgccctgcatgagcatatcgcggatgatgtattcatccagggaattggatgcgcagatcttgcagtcttcaaagccggcgtcgtcgagcatctttctcgcttttctggaaagatacgtgatgtcgccgctgtcgatgcggatgccggccgggcggaagccctgcggcacgagtacttcgttaaagacgcggatggcgttcggcacaccggatttcaatacgttgtatgtatcgacgagcagcgtacagttgtgcggatattcttcggcatacgctttaaacgcttcgtattcgctgtcaaaaagctgtacccagctgtgcgccatggtgccgagcgccggaacgccgaaacggcggtcgctgatggtgcaggcagtgccgatgcagccgccgatatatgcggcacgcgcgccataaatggcgccgtcaaagccctgtgcacggcgggagccgaactccataaccgctctgccgtccgcagcgcgcacgatgcggtttgtcttcgttgcgatgaggctctggtggttgatggacagcaaaaccatggtctccacaaactgtgcctgaatgaccgggccgcgcacggtgacgatcggctcacccgggaagatcggcgtgccctccggcacagcccaaacatcgcaggtaaacttgaagttcttcagataatcgaggaactcttcgcgaaaaatgtgcttggagcgcaggtaatcgatatcctcctgcgtgaaagaaagctcactcaagtaattgacgagctgctccacgcctgccataatggcaaatccgccgccgtccggcactttgcggaaaaacatatcaaagtagccgatggtatccttaaaaccgttggcaaaatagccgtttgccatagtgatctcatagaaatccgtcagcatggtcaggttaatatgatcgttagagagattctgtgccataattcagccaccgctttctgaaatgaaagcattcctttccccgggagtgaggtgtgtcctcatacgtcttgttttttaccacacacggccaaaagcagcgctttaagccgatttgtattattataccgcaattttttaaaaagtacaatgaaaactcacggcaaaccgaaaaaatctgcatctgcacggaaaacggcgcgtctttgcaaaatgttttgttaaaagtttagcaccacgtacagtttacgcgttttttcggaacagaacaaaatccggcctgcaagcacagcagaccggatctcatttcggttaattattcggcttccggtccgacatcggtcacggagatggcgtcgaggattgtcttctccatcgcctgcttgccgtacttatcgacatctgccttgttcttttcgccgtgggtcaggcagcctgcgccgccgatgcagccgccggtgcacgccatgccctcaatgaagttgttcggcagaacattcttggaggcacgcagcaaagccgccttgcaggcttcgatgccgtcgcatgcgatggcgttgagcttgaagtcttcgttgttctgctccttgagcgcttccacaaccgcgtcggacaaaccgccgctgcgcgcaaagatacggccgtagtaggaggcgttgtcgagcacgccttcttcgagcgtggtgaggtcgatgttgcggctgtcgaacagcgcctgcagctcttcaaaggtcagcgtgcagtcaatgtatcggcttgccggctcgccttccttgaactccatcttcttcgcggtgcacggcccgatgaaaacgacctttgcgcccggagtggtctccttgatgtagcggccgatctcagctgccggagacaggttgtgcgagattttatcaaccatggtcgggaagttcttcttgatgtaggaaacgaatgccgggcagcaggagcttgtgaggaagcccttttccgcaagctctgccgcttccttatacgcaaccatatctgcgccgagcgccgcttcgatgacatgatagaagccgaggcgctgaatgccggtgatgacctggccgagctttgcatagctgaactggctggaaacggacggtgctacgaccgcgtaaaccttgtagtcctgattctcgtggctgcccttgataaggttgacagcatcgagaatgaaggacttatcgacgattgcgccgaacgggcactggtagacacaggcgccgcaggagatgcacttttcgttatcaatatgcgctgcgcgatgctcctcgctgctcatgctgatggccttaatcttgcaggccttttcgcacggacgcttctggttgatgatggcgctgtacgggcatacctttgcgcactggccgcactctacgcatttcgacttatcgatgtgcgccttctgctgctcatcaaacgtgatggcgccgcggcggcatacgtcctcgcagcggtgtgcaagacaaccgcggcaggactctgtgacgacatggccgctgaccgggcattcgtcgcaggcaatctcgatgacttcgatgacgttcgggtttttcttgtcgccgcccatagcgagcttgatgcgctcctcaacgatggcgcgctctttgtagatgcagcagcgcatcgtcggtttttctttgacgatcagcttcggaatctcatagtatgcggcgtcgaggttatcctcaaaaccgtaacgtgcgacctcgcgcaggaccttatacttcaaatactggattttcgtatcaaactttctcattcttcacatcaaacctttcttgctttggacagagacttccttttctatattttcaaaccttccttagagtgccgagacactctatacgcagaagcttttctgcgcttagaagtaagataccttaacttttttgcccatcttctcgagcgaggtgcagagattttcgaccaactgcatcttaatgttgaagttaatgggcagattcgggttctggtgcgccgggtttaccgcacgaccgacaaagaagttgatatcggtcgcttcttcaaacagcatgcgggcgatcatagacgcgccgtcgcgcttatagccccactggctgtacttgcggttttcctcaaggtaatccttcgcgtactcgacgaccttgctcatggtgatgacgccttcggtgacaaggtcgagtccttcgaccttcgccgtgggcggaatatcggaatcgaggtaatcgagctgtgcgatgatgggctttttgaggtattccgccgcaagcgtagacgtggtaccgccgcagacaatccgcttgccgggtgccgagaagaacgcctcgtgcattttcgcgagatcttcgggtttagacggcggtccgatcatcaggttcacgcagcagcgctcgcgcactttgacgcagaccgcggtggtatcgtcgcccggctggccgccgtagagcttgttgcactcatcgagcagcagcgcattgagcgtttttgccgtgaagctttcgtcgtacatcatctccatatagtcaatgatgtccttgcgctcccagccaaaattcagcgacatgccgatgccggcatgaatggcgccgtcgctgaacgcgatgaacgtgtcatccttctgaatcgggatgcgggtcttatagatcgttttgccgccgatctcgacggcttcgcgcgggtattcccagtttttgccgttgcgcagcagaaccacgaacgggttatcatactgaatgatctccgcttcttcattttctatgattcggatgatggtgaacgtggaatacgccacgccgcgcaccgcgcagatgggcagtgtagacgcaatggtctccacgcagtcttcgacatgcagcccctccgccatcatggtagagatgatctttgcggtcagcgtggaaagaatgttcgccttaacgccgctgcccatgccgtctgccagcacaaccaccgtggaattttctccctgcggaacgatgtcaacgtgatcgccgcaaagctgttcaccttttttgttgaggctcatccagccaatatctgtacagagattattcatcttgcagcgattcctttaacttggtgagcgcgattttcgtttctgccgtggtctcgccgagcagcgatgcgatctcctgtacgacgcgcatctgcttttcgatcacacggttggtgacttcaatcgtctgctgccccattttttcttttttcaggtgttcgttcatttcatccgtcacatcacgcatgatgcacatgataatgtgatagttgcggtcgtagagcacggtctggtcgacatacttgccgtattccgcaaggtacacacgctcgtcgcgcacgccgcggccggactgcatgacgtcgatgaagacgcgcgggtccagaatgcggatgacctgcttgccgagcacctcggatgtatgcttcacgttcacgatcttacgcgcggcagcgttgatctgctggatttccagcgattcgttcagcaccaaaatgccgttcggcgtgttgttgatgatggtatcggagaacgactgcgctttgccgagcagatacggcaggcacatggaaatctccgccttgccctgataaacagcgatggccttttcgcggcaggtattatagccgcaggcaccgcagttcaattcctgctccgggcgagtcttgcccatctttttgaggatagcctcaatctcgatgttgcccggcatgaggtgatacaggctgatataatcaaaatcgtgcttgagctcttcggaagccggctgcggcaccacaaagtcctttttgccggcatacttattaaccgcgataaaatcctgcacaggttgacgctggccctgatccatagccgggccgttgatgcagctgccgaagcaggcgctcatctcgacaaagcagttctccattttaccgctcttgatgtcttcaagcgcgttgatgcagttttccacgccgtcgatcgccatgtatgtatactcggggtcatcgcacaccatggtgcgcagaatgcctccggtcgtcgggaacaggcgcgcacggctttcttccgtgtgatcctcgcctgcttccacggtgatgccttctttttcaaaccaggcggaaagctcctcgaacgtgagcacacagtccacatacgggctttcgtcggcctctgcctttttggagatgcacggcccgatgaaaacggtcttcagttccgggtcttcctccttcagcatcttacagtgcgcctgcatcggcgacaaaacatgtgcaaggtacggcagagcctccgggtaatacttctgcacaagcgtattgacagagtgacagcatgtggaaatgatgacgctctgccgacgctctttaatgatcttttcgtattcggtcttgacgacggacgcacctacggcggtctcctctacacggtcaaagccaagctttttgagcgccgcacgcatcgtttcgatggtagcgcccgggtaatttgctacaaaggatggcgcaaggctgactgccacgggacattcacccttgacgaacatctccgcaatcggtacgtcatttcggatttcttttgcgttctgcggacatacgacaaagcactgaccgcagagaatgcactcgtcttttacgatatgcgcctgactggactgaaaacgaatggacttgacagggcaatgacggatgcacttataacagttctgacagttagactttttgagcttcaggtagtctggcataccctattatcctctctttaacttatcctcttttagcgttcgctttcgctacgaatttttcatccttgacgatgaatctttcatgggtaccgctgccgatggggccgacctcgtcaaacgccttaaccgtgaacaccaaacggcggttgtccacttcggtaagttcgcactctgccgtaacatgcatgctaagcggcgttgcggacgtgtgctgcacattcatcagcgtgcccacagtgcccatgcccggctctaattccggcgcaacgcacttccaagccgcctcttccatcagcgcgaccatagcgggcgttgcaaaaacgtccagcgtgccgcttcccatggctttggctgtgttcttctctgtaacaacggtctcggctttgcctttcattccggctgtcaacaacttaatcacccttacttcctattttctgctgcgttttgccgcacacagcagcttacgcacggagagccgatgcaaaaaggctcttgcaccggctaaatttttgtttcttatgcttactgaacctttgcgagaatctctttctggaagaattcctcggtggtgtcgggagatacggaatgcttctcgccgtctacggtgacgttgacgccgtttacgcagtcacccatgcagaaagtgccaccgagttctaccttatcttcgaggtggttttcctttacgagcgcctgaagcttttccacgacctggcgggaacctttcagatgacatgagctgccgatgcagatgataactttcattctaatcaaactccgtttcttagtttttggtttttacttatttgtttatctaatggcatagaaaagggatcttccttttctgccaagctaacttaggtattggcgtcaaatttctccttgagctgcttagataagagcgcaagcgacgcggcgaggttttcgttatgtaccaatatgccctccggcacatcgagatgcacgggcgcgaaattccagatagccagaattccgctttcaatgagcaagttgcagatggcctgcgcattttctgccgggaccgcgatgatgccgatgcgcacgcgcatgcgctcacacagatccatcagcttatccattgtcagaatgcgtttgccgccgtaatcttcctcacatacctcttcatcgatatcgaacgcggccacaatgttcatgccgcagtctttaaagccgccatacgtcaaaagcgccttgccgagcttgcccgcgccgacgatgatggcgtcatcaacatcattgtagcctaagaattcctcaagctctgcgatgagcgcctctgtgttgtaaccaaccttcggcttgccggccgaactgaccgctgcaaggtctttgcgcacaacgacatggttgaggcgcagcgcctctgcgatggtcgtggcggaaatgtgttccggcgtgttttcgccgagctgcttcatataattcaggtaaagcggtaacctgagcagcgtttgttttgaaatgctgcgattcaccatgacgcagccaacccccatccaaacagaaaatcaaaataaaccaaacatctaatactttaacacaagaaacgaccaaatggaatacccattttcaaatatcgatataatttcatcgatatgaaagcaaaaaagccccaacgacacgttaaaaaacagacaaactaaatcaaatacaaacttcggcggatttctactccgcatgcggcgtgccgaactttgcgctcaataaatcgcgctcctcatacaacttttcgatgaactgtttatcgaccgccgtatatttatattcctttttggacgtcaaaatatctctatacacgcggtgtttgttgccgcggcacggttttagcacaagctcatagcgttcaagttgttccacatccgtcggcgagacccacatatatgtgtgcggcaccgtcgccaaaaggtcgagctgactgccgcggctgtaaacatacacgcgtttggtgacgttttcgtccatctctgcctttttgatgtcggacatcggcagcgacggcacgaacggatcgccgtggcaaatttcgatatagccggaaaggtcttctatatccacaacattcttttgcgagagcgggtcgtttttggagatgagaagctgatactcgaattcccagatgttctccgacttcatgcccttatcgcgcagcatgttcgtaaaaaagctctcaaagatcgtctgataccgcacgatggcaaggccgtagttttcctgcaccacgttgcgaatggcacgcatagcgttcgtttctttgaaactaaactcgatttcctttgacatatccgcctcacggacaaacttggaaaacgcatccgcaatatagctggcgcgcggcaccgagatgctgaacttcagcttattattcttttcgggcttataaagcgactccatttcttcgatctgtgccagaatactcttggcgtagccgagaaactcctctccctgcggtgtgggcacaatgccctttgaggtacgcttaaagatcttgacgccgagcgtctcctcaagctccttaatcccgcggctgaggttcggctgccccataaaaaggttttcggcagccttagtgatggatgcggtcttctctacttccaccgcatatttcagatgtgcgatgttcattgcgttctcctacggacatatttgaaagggcataacactatttcgattatattataacatatcccgctctcttgtcaaatacttgtgcacaaaaacagcgtaaaatccgaaaaaatcggcggctaaaccgcattttcgtccgaaagcaggggtgcaatgcgcttttcggcttcgagtactgcgcgggtaatctgctccgtcatctcggcgcgtatggtacacaccgccgcaagggtatcggcatccggagtgttttgccgtgcggtaacagcaactaaaagttcgtctaagaacgcgtccacctcggcggcatcgtaggtgttgccgcgctttactgtaaagcgaacagcctttatatattcaggtgtcagctccattttcggcctcctcccccggctttctgccgtactttggctgatatagttttttcggcagaacgcgcgagaatgtatagaaaagcgccgcgccccctgcaaatataggcaacagaacgggccaatcctccgcgacgaaacccatatgcggcaggcagaatgcgctcactttgccctctaaatattcatacggcacctcggcatagactttaaagtcctccgccgtatgccaaacgcgggcttcagggtcgttttcggtcagcgtcagcagcgataggccgcgttcggtttgaatcgccgcgcagtcacccgggaaataatcttcggccggcatatatgcgtaatatgcaagcgaattcacgggataacctgtgcagtcagtttgctttacagcaaatgcgttctgtccgaacagaaccggcgaaagcaaaagcagaatgcaaattgtcgtaagtgtaccgacaagtgatatagctttacttattttgattgtaaagctatttatcttcacaggattaacattcatgattcatgcggccgactgagcatctcctcagccattttgagttttaacggcgtgatgtcatcgccgccgataatacgggcaatctcgcggacgcgcgcgtctttcgtcagcgtgtgcaccgccgtgtacgttttgttgttctcctgctttttgacgataaacaggtggttatccgccatggcggcgatctgcgccaggtgcgtgacgcagatgacctgcgcgtttttggagacgcagcgcagcttgataccaaccttattcgccgcttcgccgctgatgccggtgtcaatctcatcgaagatctgcgtttcggccgcgccggaatcctcagacagcacggtgttgatggcgagcataatacgcgaaagctcgccgccggacgcaattttcgacataggcttcggatcctcacctgcgtttgcggagacgaggaactggatgcggtcgcagccgaaggctgtcaacggtgtgcgctcctgctccacggtgaaaacaacgccgggcatgttgagctctgaaagctcctgccgcacacggcgggaaaagctctcacacgcggcgcggcgcttcgcggatagctgctttgcaagcgtcaccgcttcttttttcttctgctcatactgctgcaaaagtaattcttttttttcatcggaaaattcgatgtccgaaagctccgcacgggcacggtcgaggaacgaaagcatttcttcctccgtttcgccgtatttgaggctcaagcggtagataacttccagacggctttcaatctcatcgagctcgtttgcgtcgaacatggcgttatcgaggtaatcggagatttccgctgcggcatctgtcagtgcgtattcggcgtcgcggacatgctcggcgacgtttgaaagcgacggtgcatagcgcgccgcctgctcgagcgactctgccgcaacggatacggctgtgatggcaccgccattgtcctcatcgccctgcaaaagcgtgacagcttcgcccacaccgcgcacgatacgctcactgttgcggatctcatcgcggcgctcggtcagctctgcctgttcgccgacgcgcagctgtgcagcttctaattcttcgatctgatagcgcaaaatatccatgcggcgggacttctgcccctcgtcggattcgagcgcatcgagctcgcctttgatgcggcgcagcgccgtatacgccgcgcggtactccgcaagcagaccgtatgcgcccgcaaagctgtcgatatacgtgccgtgcacttccggtgaaagcaacttgtagctttcatgctggccgagaatatcgatgagcgtgccgccgacggcgcgcagcatggaaacggtcgccgggatgttattgagcttgcaggaggaacgaccgtgcgggcgaatctcgcggcgaataagcaaactgccatcgtcttcaagcggaatatccagctcacgcaaaacctgctgcgtctgcggagaaacatccgtaaaaagtgccgaaacactcgcctgctccgcacctgtgcgcacaagctcctttgaggtacgctcaccgagcacggcgtagatcgcgtcgatgatgatggatttgcccgcgccggtctcgccggtcaaaacggtgaagcccggttcaaaatcgatagacgcctgctcgatgacggcgatattctgaatgtaaagctgcgtcagcatatcagaccccgccaatcagctttctgagctcgttctgcttttcctccgcaatctcatccgttttacagatgatgagaatggtgtcttcaccggccagcgtgccgatgaaatccgggaaatgcagcgtatccatagaggcgcagaccgcctgcgccatgccggtcatacacttgacaacgatcatgttgccggccgcctccacgctcataacagaatcgccgaacagcgaatagaacttggaggaaatgtcgcgggcattgtcgcgcccggtggaatatttatactttccgttcggggaaagactctttacgagccgaagctctttgatatcgcgggaaacggttgcctgggtcacgtcgaagccacaagcgcgcagattgcgcaggagctcctcctgcgtgtcgatatcctgtgctttgatgagctccagaattttggcgtggcgtcttgttttcatgctttctgccttccttcctgccttttaatttctgctttgcataaatttgctgtctacaatatcgtaaaaattgcgttcgtcggtctgaataagctcagtgtaataggtcgagcggctgacggaaaccgtgtccgtcttatgaatgcgtatgggtgcgccaccgtctatggtgagatacacctcgccggaataatcgctgtccgtgctgaccgtgatggtcttatctgcgcagaacagcgtgctgcggttaaagagcgcatgcgggcagatgggcgtgaagattacgcattccgattccgggtctaccaccgggccgcccgccgagagcgagtacgccgtggagcccgccggtgtagccaaaatgaggccgtccgcgcggaatttataaagcttggaaccgtcgacggaaaagccgaaatcgtaaattctggactgtgcaccggagacgaccgcgtcgtttaaagcgcggtaggttgtatcccccttcacgctgtgcacggtaacggaaagcatcatcaggcggcgcacacggtaatcgcccgtaaagagcgcctttaatttgtgcagctcgtccttctccacacctgccaaaaagcccagccgcccaagattcactccaaggataggcttacctgcaacggacgcgtgctttgccgtgtgaatgatggtgccgtcgccgccgaccgcaacgataaggtcgcagctttccgccagtgcggcgtgatttttgcagaacgtgacgtgttcatactgcccgcggtgcttttcgtgcatgagtgtttccgcaccgttttcctgcaaaaccgccagaatttcccgggtgtatgtgtccgcatcgcgtttatccagatttggaatcaccgcaattttcataagcctcagtcctttttgtccagcgccgcgtgagatgcttccacgacctcatgcggcgtgctttctgccgtattcaccggcgcgtcgcttttttggaggaacacaagatactcgatgttgccctccggtcctttgaccggcgagaacgtaagtcccagtacggaatatccgttttccactgcaaaatcgcagatcatctgcaccacttcctcgtgcacggctttgtcgcgcacaacgccctttttgcccactttttccctgccggcttcaaactgcggcttaataaggcacacggctttgccgccgtcctttaaaagcggacgcacggcgggcaaaataattttgagcgagatgaacgacacgtctacggagaagaagtcaatctcctccggaatttgctcgcgtgtgagatagcgggcgttcgtacgctccagattcaccacgcgcggatcggtgcgcagctgccagacgagctgcccgtagccgacgtctacgctgtatactttggaggcgccgttttgcagcatgcagtccgtaaagccgcccgtagatgcgccgatgtccatacatacggtgttttcgagcttgatcggaaacagctgcatagctttttcaagctttaagccgccgcggctgacgtagcgcagcgtgttgccgcgcacctctaagactgcgtcttcacgcacggtgtcaccgggcttatcgaatttctggttatccgcgtaaacacagcccgccatgatgagcgtgcgcgctttttcgcggctgggcgcaagccctttttcataaagcaggacgtctatcctttttttcatatagaaactgcctttccatctttcttttctgcgatttgcagcgccgtgtgtacggcgttcaccatgccctctacgtcaagaccgagcttatgcagcgtgcggaacataggcgcgtgcttgatgaatccgttttcaatagcgtgcacttcgtagtgtcctctgaaattgcgatccaacagcatggcgccgaattcctccgcgatgccgccttggcggacgccctcttcaaagaacagcaccgtgggacactttaagaccgcttccaccgctttcggatcgatcggcacgatgcgattgagcttcacgatgcggcactttatgccctctttttcgagcgtttccgccgcttcgcacgcaaacgagaacatacggccgtaggtcacaagcgtgacagaagcatcttccgtgccgaacacgtaaaacggcttgccggaaagcgtgtagttttccgggcgatacagctctttgccgcgcgggtagcgaatagcataaaggtggttttctcccttaatacagtcgtcaagattgtccgaaagctcatcgtaatacgtcggcgcgtacacgtggatgtccggcacggtgcgcaggaacgcggcatcgaacacaccttggtgcgtctggccgtcttcgccgaccacgccggctctgtccacagccagaataattttgagatgctgcaaggcgccgtcgtggatgagctggtcgtacgcgcgctgtaaaaacgtggaatataccgcaaaaaccggaatcatgccgccgcgcgccagaccggcgcagaacgtgacggcgtgttcctccgcaatgccgacatcaaagaaacggctgcggtatttttcgcggaaatccgtcagaccggtgccggattccatcgccgccgtaacggcgcacagcttctcatttacaccggctatcgtgcacatcgtctcgccgaacgcatgcgaaaaacccttggcaatggcttcgcccgcgcccttttcgcggtcaaacgccgcaaggccgtggtaaacgctcggagcgttctccgcgtatttatatccgcgtcctttataggtgcggatgtggatgagcaccggcttatccatatcgcgcgccatcgtcaaaaccgatgtcaaggtgcgcaggtcgtgtccgtcgaacgggccgtaataattaaagccaagatcctgaaagatcgtggtgttgaaaatattctttttgatttggttttttacgcggcgcacttcggcagccatgtgctcgcccaccttcggcacgcggcacagtgcggcttcgacactgtcttttgcgttcaaataccccggctttgcgcgcacataggaaagataacgcgcaatggagcctacgttgcgggaaatggacatggcgttgtcattcaaaatgacgatcatattgcggttgatgcggcccgcattgttgaggccctcatacgcaaggccgccggtcaacgcgccgtcgccgatgacggcgatgacatggccgggatcacccgcaagtgcctttgcaacggaaaggccgagcgccgaagaaatggacgcgctgctgtgccccgttgtaaacgggtcgcagtcgctttcttctctcgacggaaagcccgaaagcccatcctcgcggcgcagcgtggaaaacgcttcttctctgccggttaaaagcttgtgcgcgtaggactggtgccccacgtcccacacgatgcaatcctccggcaaggtgaacacacggtgcagcgccacagtgagttccaccacgcccaaattggaggcaagatggccgccgttgtccgccaccgtgctgatgatctcttccctgatctcatcgcaaagctccggcagctcgtttgccgcaagcttttttacatcgttcggggccttgattttactgagcaatctgctcatacttacaccagtccgttctgtatttttgctgccgttacggcgtttttcatcagcattgtgatggtcatgggacctacgccgccgggcaccggcgtaaggtaaccggcgaccgcctcggcgctttcgtaatcaacatcgccgcacagcttgccgttttcatcgcggttcatgccgacatcaatcaccacggcaccgggctttaccatatcgccggtgacaaatttcgccttgccgaccgcgacaacgagaatatccgccgttttgcagatctctttcaaatttttcgtgtgactgtggcagatcgtcaccgtgccgttttcatgcagaagcagcatagccatcggcttgccgacgatgttgctgcggccgatgacgacgcagtttttgccgtcgattgtgacgccggtagagcggatgagctcgatgatgcccgcgggcgtacacggcaaaaacgcgaaatcgccgatcatgatgcggccgacattttcggcgtggaacgcgtccacgtcctttttcggatcgatatgctccacgatgagtgcttcgttcaagtgcttcggcagcggagactgcaccaatatgccgttgatcttcgggtctgcgttcagcttttcgataagcgccaaaagctcctcctgcgtggtgttttccggcaggacgtgttcctcggagtaaatgccggtctcggcgcaggccttgcctttgttacgcacatagattttagacgcggggtcttcgccgacaagcacgaccgccatgccggtctgaacgccctgcttttttaaagcggcaacttcttcggcaatttcgccgcgtacctttgccgcaacggccttgccgtcaattctcactgccatcgttcttctcctcgctttccccttctgccgtttcattcgcttcttcggcttcatcagacggctcttcggaagtgttcgcatccgcatttccttccgttttttcattttccgcctcggcagttttctttacgccggtgccgactgtcatgtgctcctgtgcttcttcggcgctcatgccggagaaaatggtgctttcggcagtgtcgtcaatctcgaccttctccgccttgtcttcaactgtcaggccggcagcttccatcgccttgcggctgccgcagcccgtaagcttatggcagttgcggaacacgatgagcaaaacaacagcgacgagtgcagaagccgcagcaagcacctgcgaaacgcgcagatcgatacccggcaacagcagactgtctgtgcgcagaccttcaatgaagaagcgcgtcacgccgtaccagatgatgtataataagaacgtctggccgtcataccggcgcaggtggcgcgtgaatagatgcagtaaaacaaagcctaaaaggcacaaaatcgattcgtaaaggaagcacgggtgcacattgcctaccacttctgcggcggtacggtcactgtacatgccccacggcaggtcggtcgcgcagccgaaagcttcttggttcacaaagttaccccagcgaccgacaccctgaccgatgagatagccaagagacgcgacatccagcacggcgaacaggttcatcttgcggatcttcgcgacgatgccgccgcacagcaggccgccgataatgccgccgtaaatgccgaggccgccctctttgatgttgaaaatctccatcgggttcgtgatgtacttgtcgcccgggtagaagatgacgtagtaaagacgcgcgccgatgatgccgccaagcaagccggcgatgatggcatcgagcaggtggtctttattgatattcatttttttgcaggaggaaaaaccgtacagcaccgccagcaggaaaccgatgccgatgatgatgccataccagtaaatggtgaaattaccgacctgaaacgcgatgggattgacctccaccgaaattccgagattcgggaactgaacttgatgcgtcatgactgtatatcctttcgattaagcttcgtccaacggacgaatgatggaagccgccgttttgtccatatcaaacagcgtctgaatgcgcgcgttcacgtcttccgcggtgatctcggagaagcactcaatgtagcggaacagctcgcggtcgttaaagtgcatggtcatcacggcgttcgcgatgacatccgggctattgaggccggaaacattcgcgccgtaaagggatttcgcgctgcggcgcacgtcttcctccttgacaccttcgcgctttaaacgtgccatttcctcacggatggcatcacacacggcctccgggttgccggattcgccgccgaacagcagcgcaccgtagcccgtgccctcaaaatactcgtagctgaaggaagcttcgttcacaaggcccgcatctaagagcttgcggaacatcggcgaactgtcggacgccataatgtcgagcagcacctcggtgacggcaaggtctttttccgtgcggtgcgcaccggttacggcctctttcacgccgaactggaacatagggcacgccacaggcagcttttcttcgacgagcggctgcacgatggtatcgggctcctcttcaaaaacgcgttccacctcaacgggctcgctctttttcagcattttgtcgcacagcgcgaggacttcctcctccgtacagttgccgcagacgcacagtgccatgttgttgaggttatagaacgtgttgtagcagcggtaaaggtactccggggtgatttccgcaatgctctccaccgtgcccgcaatgtcgtccttgatcgggtgcgtgtggtacatggcgcgcagcaggctgaacatcatgcgccactgcggatcatcgtcatacattttgatttcctggccgatgatgccgagctctttttcaacggtctgctttgtaaaatacggggactgcacgaagtcgagcaaaatctccagcgcctgctctgcgttttccgtgcaggagaacaggtagcgcgtcgtctcaaacgacgtatacgcgtttgcggaagcgccgatctcggcatagcggccgaatgcgtcgccgtcttcgctttcaaaaagcttgtgctccaaaaaatgcgcgatgcccgcgggtgtcgtctctgccttatcctcgtcgctgcgtttaaagaccttatcgatggagccgtagtgcgtgccaaacaccgcatacgtactgcgcatttccgctttcgggtatataaacacggtcaggccgcttgcgtgtttgacgcagcggtagccgtcccgaagaagtttactttccacaagggtattcttcatttctgcgctcattttgccgctcctttcagcttatagaccgtatcgagcgtgacgcgctcggcggcgctgacgatctcgtccttcgtgatgttcatgatacactccgcatattcctccggcgtgtggagcttgccctgcagcatgccgctgagataccatgtctccatggatgccgcggaatctgccacggcgttgtagctgttgcacatggcgagctttgcaaagagaatctcatcgtccgtgatattgccctttttcatatcgttgagctcttttaaaatcgcttcttccgtgcggtcgaggtctttcgtttccacgccgctctgcacgagcatgacgttcttcggcgtatcgtggcgcgcggcgcagtagtagcaaaggctctgcttttcgcgcacgttcataaagagcttgctgctcggtgtgccgccgagcacaacggacatcagctttgccgcaaggcgctcttccggcgtggtgccgatggcaaagcccatgacgagcttagactgcacaacgggcatttcttccgtcacacgctttacgtctcccgatgctgtgtggcgctttgtttcaatggacaccgcgtcgcgcatgccgaggcgctttacaagctgctgcgcaaagcggtcgtccgcaccgtcgccgatcgtgaactggcagatctgcgcgtgctttacggcatactcccacgccgctttcacgccctcgcgggtcgcgttcaagatcgcctcgcgcgtaccgatgcgcggcacacctgcgggttcgcccgcaaacatggtctgcacacagcgctgcatggcatacgtcgccttatcgttatattccgcgtcaagcgtctccaaaagctggcgctgttcctgcaaaaaaccgtcctccgggaacagaccgttttcatcgcacagcggcgtgaacagaatgctctccagcatttcggaaagcgcctgctgcacatcttcgccgccgaacgcatacgggttcgcaatgccggctgcggcaagcgttaaaatctggttatcgcccacacgcgttacacccggctgcaccgaagcgccgtacagctccgcaaggcgcttgccgaactgcgtgtaatcggggtattcgcgcgtcgcacgggagattatattcgggacgagtgcatataaagccgcattttccggcgtggtaagcggcagcacaaggtgtgcggaaacgcgtgccgttttaaactgcggcgtgctgctccagaacgcctgcaagccgcagtccttctgttcaaaaaaatgattattcatctctgaaattttccttcctgaaatagtttaaaaccgaattttcaaaaggtatagttgcataaatatgctttcgtattcgtattatagcacagcttttttcaattttaaagccaaagacggctttttcacaaaaaattcagtttacgcgcgcacaaaaaaccgggcgcaacacttttcgatgcacccggctgaagctgcggtctcctcgaccgtattcaaattgatctcgatgtccgtgaattcttcccccgaagtataatatacccgcttcgtaatgatgaggcgttctccttttgaaatccacctcaaccgaggtacattttttcaaacgcctctatgctgtcaaacacattcggtttgagccccgctttttcgtattcctttgcatataagctgagtgcgccgtcaaactgcgccgcagccgccgagtataaaggttacacaggctttatagccgtcctcgttccgcattaaaacaaacaggtcggacgttttcgaatatcgccccgtgcgacaggcgcaaaatgcgggacggacacattctgcaccgcttttcatacatcagccgcagcttcagtatatcaaaagtgatggcaaggcgcaatattttctcttaatctgtggaatattttatataatttgtcaattctgttgtgcttctttaaacctttccagctccggcacggcgttcgccatttcggctttggcgttttcgcctgtcaggtggtctacggcgtacagcaccacgccgtctgcacccgcttcctttgcgcggtcgatctgctttgcgagcatgtcggtcgtgttgagccatgtgccgttgtccgcatccgtgcccgccttatacaccgcaagcccgatatacagtttgatgcttggcaggcgctttaatgcgcaccaattttggagcgccgtttcaaacggcagcgcttcattttcaaagctgtaataaagctgcgggcaaacgtaatcgatataccccgcctgcgcacaccacgtgtacacgtcagcattgatcatctcgttgttttctaaattgccctgcggcgaaatgccgaactgcacattttcattcgcttccttcacacggctgtacacggcggcgatgagcgcgttcacattcgcggtgcgccactcgtgcagcgtgagcggctcttccgtttcttttacatacgccgtgtactgctcggcgtcgatgctttcgtcgtccgtggggtaaaaatagtcgtcaaaatgaatgccgtccacgtcgtatttttcggcgatctccgctgcgccgtccgcaatgcggttgcggatatacgcgcttgcggggttataataaatgccgctgttgtacgccataaaatattccgggtgatttacataattttgcatataaaatccattttcgtcaagctccggcggaattgtcgtgctcgcaatgcgcagcgggttgatccacgcgtgaaactgtatattctgctcgtgcgcggcgtttaccatgtattccattgggtcatagccggggtctttcccctgcatatcggtcaaaaggtgcgaccacgactcgtactccgagggatacaggctgtccgcaaacggccgtacatgcacaaacaccgcatttgcgccgacgcttttcgcagccgcaagcttggcatcaaaattctccttgaacgtttcttcggtcttctccgtcacatcgagcgccatatacggaatccacacgccgacaagcggttcttctgcttttgcggtcgtttctgcggcgttgctatcctcatgctccggcgcagtgcttgagaatacgacttcaacggagttttccgccgcacgcggctctgcgtttttctcccgtcccgccgcgcttttcatcgccagaaatacggccgcaaccaaaattaaaaccgcgatgacataatgatactttttaattacgatcatacgctttttcctttctctctgcgttcccttgaccgccaaacggatttgcggtaagataatcataagtatgagacaagcgaggaaaatatgatggattttaaactggaacccgtgcagttcacactgctgacctattattgtatcatcaatatcacagccgcagtcctgaccgttaccgataagcgccgcgcacagaaaaagcagtggcgtgtcccggagcgcacgctccttttgctcggtgcggcaggcggcgcactcggcgaatttatcgccatgctgtgtatccgccacaaaacaaagcacctgaaatttgtgatctccatgcccgttttcatcgtactgcacatcgtccttttctatcggatttttttgctttgagggagactttaatgaacacaaaatatagaaatctgctgtttgatgccgatcagacgctcatcgattttgaaaaggacatgccgctcgcatttcaatatatgtacgagcaatcggggcttgcaaagcaaaagccatacagcgcagagattctgcgcctttataacgactgcaacgaaagctggtggcggcgttttgagcaaaagctctgcaccaaagcggagctgtaccgcaaccgtttcgtcgatttcttcgaggtcgcggggctcacaccggtcagcatcgattttttgcaagacctatatgtctccggcatagcgaaaaccggcacgccgctgccgggcgctttagatatgctgcgtgcgctttcagagcgttacgacctctacatcaccacaaacggaaatccgatctcgcagcccggacgcctcaagaattccggcgtcacggcctttatgaagggctgctttatttccgataagattggcgcggcaaagccggataaaaaatatattgattatgtccttgcgcacataccgggcgcgagcaccgaaaactgtctcgtcatcggcgattcgctttcggcagacatcaaaggcgcgcagaacgccggtttagacagcttatggtataaccctaatcgcaaagcaaacacccttcccataccgcccaactttgaagccgcaagctacgaagatatcgtaagaattttgctgtaaggagcttttatggagaaccccgacatcgaccgcccggccgtgcacatcggcttcccctttttcgcggcgctgtttgtcgcctctttcttcggcgcgccgtttgccgccgtttcggcggttttgctgttcgccgccgtttttctgcttttgctgtttaagcagcatcgacaacggccgaatttcgtgctttccctcatcgccaccgcagccgcattcgcggtgtttgcagttgcaatgaatctattcgtgctgcccacagagcgctatgacggcggcacatataccgtcaccggaaacgtagagtcgttcctcacgaaaagcaacgggcggttctattacaagctgcatgtgacgcacatcgacgagcctgtacaggatgtcgatttttcggtacgcctctcccacagcgaggctttcccggcagagattggcgacacggtcacgtgcgaagcgaagttcttcgcgtttgaagacagcctcgggctctccccgcgcacctcgtggcttgcggataacatggtcttatccgcctatgtcacggattacgaatccgtgcaggtcacgcctgtcgaaaagcgcccgttttcatattatgtaaaccaaatccgcacgcattttcacaatttgattttggaaaactaccccaaagtcgaaggctctgtgctttccgccatgctgctcggcctgcgggacgatatggaaaccgagcttatctccgcctacaaaaaggccggtgcttcgcacattttggccatatccggcatgcacatggcgatcttaacgcagttcaccctcggttttctgggtctgctcggactgaaacgccgcccggccgcgctcgtttccgcggtgtttacgctgctttttatgttcgtctcggggctttcggcctctgtggtgcgcagcggcattatgcagctcattttgcttttcggcattcttctcggtcgccaggcggaaccgctcaactcccttgcggtcgccgttttgaccatgagcttattaaacccgttctgcgcgggcgatgtctccctgttgttctcgttttcggcgacgctcggcatcatcctgcttgcgccccgcatcacaaaagcaatcacgaaaaatattcgcaagccgcagcggaaagcgcaccttgcaaagcttgtttctgcattttccgtctcattttcggcggtgcttttcactgcgccgctgcagctttatttatacggcacagtgcaattcgtttcggtgctcacatcgcttttggtgttggaaatttccgcgtggctgctgcggttcgggcttatcgccgccttgctgctcgccgtccccgttctctccccgtgcgccgcaccgttcgtgtttttaagcggcatttgcgtgaaggcgcagaatttcatcatcacgcttatcgcagagcacattcccggtacgctgcgtatctccggcaaatatctgcccgtaaccgtcgtaatctgcgtccttttcttcacgctttccgtgcttctctaccgccgcaaaaataaagcgctgccatgcgttttaacggtgtgtatcctgctttgcggcatgagtgcaaacgcgcttttgagccaaagcgccgcacgccttgtcgttttccgcaccgattacgccgcctgcacggcgattatcacaaacacctccgccgaggtgctcgggtgcagcggaaatgccgcttccgttgagaccgccctgcgcgcgaacggtgcggaacagatcacccttttactcgtgcagcctgatgaaaaaagcatccgctgcgccgaaaagcttgcacagcttttcgaggtcaagcagattctcgtgccggacaccgtatattaccctgcggaaaacgctgcgttttacgatttcagttatgtcggcgtgcttccctccggcagcttcacggtcacggacagcggcgagaccgtcacggtcaccgtaaacggcacggaaatttaccttgaaacgaaacgcagcacgtcgctttcccacgacacagatattttggtgacagaaaaaccgcaaaatgcagtctctgccccgtttacgattttaaaaacaaatggtataatagaggataccgaagcttcgctttcgcccggcgcatacctctttatgacggagcacgaaagcatccggctcgattttgacgagcgcggcacgtacacggtatacggcggctaagccgcaacgaaaggaaaacactatgcccgagattacggaaaccaaactcaaggagcagattgcaaaagagcaaatcggcagcctttactttttgtacggcgacgaaaagctgctcgtgcgccgaaatttaaatcgcctgttaaaaaaactggacggcaacttcccggaattcaactttcaggaattcccgcacgacgcgcccgtagacagcattgcggacgccgttgtcgccatgccgtttatggcagagcgcaagtgtgtcacggtctccgacctcaacgtggaagccatgaacaccgcggagctcgataagctctacgaattgctcgatactattcccgaaacgaccgtgcttattctttatctgcccacgctcgagattgatccgaaaaagagcgcaaagtggcgcacgtttttaaagaagctcgacacgcgcggcttttccctgccctcgctgcgcctgaaagacaacgagcttgaaaaatacgtctgccgcgaggccgaaaaggcaaactgcctgctctcccgcaagcttgccgagcgcatcgtgcagtacgtcggcaacgacttaaacgccctcacaaacgaagtgacaaagctctgcgcctttgcgggcggcggcgagatcaccgccgagcaggtggaaaaaacggtcacgaaaaacatggaaacaaccgtgtttctcttgagcaatgccctcgtgcgcggcgattacagcaaagcgtatgcgctgcttgatctactgatggcccagcgcgaagaaccgtacacgattctggccgttttaagcagcgcttacatcgacatgtaccgcgtgcgcgccgcgatcgaagcgggcaaaacgtccatggcgccgacggaatacggcgattaccgcggccgcgattttagattaaaatatgccgagcgcgacgtgcgcgacctttctatcgaaatgctgcgagaatgcctttcgcttttactcaactgcgatctttccatcaagctttcgggcggtgaaaacatggacagaatcgcactcgaaaagcttttcgcccagcttttgtacgtcgcgcaccgcggcagcgtggcctaaaggagctcttatgatccacatgaacgaagccctcatcgtcgagggccggtatgacaaaagcaagctttccgcgctgaccgacgctatcatcgtcacaacgaacggctttggcatctacaaggatgctgaaaagcgcgatttcatccgcaagctcgccaaagagcgcggcatcgtcattttgacggacagtgacaacgccggccggcagatccgcgcgtatatcacgtctttcgtgccgtcaaatcaaattcgccacgcgtatatcccggatatttacggcaaagaaaagcgcaaagcggcgccttccaaagaaggcaagctcggcgtggagggcatttcctcggaaattttactggaaattttaaaagaagccggcgcttccgttgagggcagcacaaccgattttcagcccttaaccccggcagacctcatgcctctcggtctcaccggcggcgtaaacagcgccacactgcgccaaggcgttttgaaagcacttgatctccccgaaaacctcacgaccaaaatgctcctgcgctgggtgacgagcgaagaaaaaaaggcgcagcttttagccgccgtagaaaaaatcaaaaacggtgcttgacaaaccgaaaagcgccgactataataagcacaatggctgtgaaagaaagaagtacgcgttttcatcggcacagagagcctgcgggtggtgtaagcaggtgcgaaaaaacgccgaaatacattccggagctgtctttttgaacgggttcccagtaaaaaagtccgtgtgcgcacgttacagcgcaagggtatgtttgtacccgttgaggtttcaggtgtgagcctgaaataaactgaggtggtaccgcgaaccacaaaacgaaacgtgttcgccctcatagatcaagtgagggtgtttttttatattcaaaattcccctccttgaagatcaagggggcttttttattgccccaaaagcccaaaacctgaaaatcgaaaggaacgaaacaacatgggtatttacgaagaattgcaggcccgcggcctcattgcacaggtcacggacgaagagcgcatccgcaaccttatcaacaacggcgaagccacgttctacatcggctttgactgcaccgcagacagccttacagctggtcacttcatggcgctgaccttaatgaagcgcctgcagatggcgggcaacaagccaattgccctcatcggcggcggcaccacgatgatcggcgacccgagcggccgcaccgacatgcgcaagatgctcacgatggaagacatcgagcacaacgccgcctgcttcaagcgccagatggaaaacttcatcgatttctccgacggcaaggccctcatggtcaataacgccgattggctcttaaagctcaattacgtcgagctcctgcgtgaagtgggcgcatgcttctctgtcaacaacatgctgcgcgccgagtgctataagcagcgcatggaaaagggtctctccttccttgagttcaactacatgatcatgcaaagctacgacttctacgccttgttccagaagtacggctgcaatttacagttcggcggcgacgaccagtggagcaacatgctcggcggcacggagctcatccgcagaaaactcggcaaggatgccgcagccatgaccatcaccctgctcaccgattctcagggcaagaagatgggcaaaaccgccggcaacgccgtgtggcttgacccgaacaaaacttccccgttcgatttctaccagtactggagaaacgtagacgacagcgacgttttgaagtgcatcaagatgctgacgttcctgccgcttgacgagattgaaaagatggaaagctgggaaggcagccagctgaaccgcgcaaaggagatcctcgcgttcgagcttacacagatggtacatggcgctgaggaagcccggaaggcacaggaagccgcacgtgcactgttcggcagcggcgcaaactccgagaacatgccgaccaccgagatcaccgcagccgacctcaccgacggcgcaatcaacattctcgacctcatgcagaaagccggcctcattgcatctaagggtgagggccgccgcctcgtgcagcagggcggtgtttccgtcgacgacgtaaaggtcaccgatatcgccaagacctgcaccgcagccgattttgaaaaaggccatgtcatcatcaaaaaaggcaaaaaggtcttccataaggtcgttttgaagtaagtaaaaaagcggcggcgaacgcgtgctggccgaaaagctgcttgcgttcttcgaccaagtgaagccggagaatgtggactatgcggcgatgagagaatttttggggaagtaaataaaacgcgatagaagaacccccgagttcaatttgcagagcactgcgaggcgaactcggggatttttattttgagaaatcaagcatgtaatttacttgttacccaattggtgaccgttgtcatccgtttattatactttgaccattttttgatcgcttcgatcgagatggagaaggccaaactcatgaccaaaagcgtaaaatagctcaaaattgcattatgtgaccaaaaaaccaaagcggaacacggtccgtaaaagaaagcatggaccataaacatatttcctgagtgttttcctaaaaactcaagaggagcagaaataacgtgcgccttaaaataccgtccaaccagaacaatgatcagaaacgcagccagcgcactgagcaaaccgcagatttgccacagatcgttctgcgagatactaaagcgcaaaaccaaaagtcccgcggcgcccaagaacaataccgtcgcaaacacgacttccgaccatttaccgtgtttcatttttcgagacatcagtttattcagcacgtctcccttggcacatgcagctgccagaagaatgactaagaaataattcaaatagctgccgccatatttggagtggatcgaatcgggaatgaattgaggcagtaaaaagccaatcggaaccactgccattccgagccgttcacacaggctgtctatcagcgggatcagaagcacgatgatctgtgccagacacatataccaccatacgccgctgagcaatccggtttggaaaaatccgaaacagcaaacacatccgcaatcattcgaatcacgctgttttcataaacacgcatcggattgcctctaacgatccaatacccgaaaaatacaaatacatagaccggccaaaaagctttcatcaaggaaaaccaacgtcggatcagaaattgtaaagtactttcagaatttgcacccccgcgtttttggtattgcagagataaaccgtacgcggataaaaacacgaacagccaaacgcatacacgcgccatgacggcaactggttggatcctatcttccgacaagaaaagaaactccatttttgtcttttcaacaaaatccacattataaaacaagtgatgaaacaggagtaaaagtataccgatcccttttacccgagccgtttccgcttttgtaaacaagttttagccccctcattttcagttaacggtttccgtatacttccagagcgtataatcatcaaaagtgccgcaggcggtcacctgcatatcggaatggccatgctcatgaaaaaatgttaaaatacgcgtttcagacgacgtattgctgacgtaatagacgtttttgcttggcagagctgcaagcgtattttcaaagccgagggactcaatgtagtcctgcacacttgggtggctttgcgtcacaccactcaaaaacaatacatttttcggaaagcaggctcggctgcttttaaacacactaaaatcatagtacagcgtctgaatcgccgtgccaaaatctaaaacatataaatcttccggcgtttcgttcacttgtgctaagaattcggggcgcagtttgccgggaattacagttttcgtgtatttttccggagaatagcttgccgaataataaaatgtaccgtctacatacatgcgatatgctacagcgtcttctataggtgcagtattgtccggcagatagtttatcccctgccatccgcctaccaggagcgcggcggcacacaacagagcttccgtcgccttgctgcgcttaaaaaacggctcacagaaatacgcgatcaatacggcggcgcagaacagaaaaccaaattctacgcgatagacccaccgtccaagtctgtaaaaatagaccagaaatccaagcaccatcagtgccaacaccgccggtacccaaaattttttgggatttgtaatggcgcagaataatccgagcagcacacagcaaagcgtcatcggataatagagttggcgcaaccgaatcatgctgagcgcttcgcgaatactcggatgcagattcacacgatgtgcattgataatatccaatacttgctgcatcttctctgtactaaacaccgcttgatctgcaaaatcccaatgcagaatcatttgataatcgttttccgatacgccgattgctgtaagttcgtcgcgcagattttcataatcacaccaggtgtaatctaatatctgggagcggattttcgtaaatgtatagtattctgtataatctggattggctgtatatgtaagtgcatttacaatattaaacaaaaagatagtaactataaaaactatccctggtacagcaattttaagaaaaaactcatataacttcatctgtttttgcttaaaacaaatcactatatgataaacaacaagtacactagaaaacgctatcgccataaagaaagcgtctctacgaaccaaacatcccgttatagccaacaaagctcctaatacacagcatttcctcctattttgttcaaaaagcgcccaagcaaataacagacatccacacatagatgccgcaatcgccgttttcgtaaactgtggcaagatatacagatcacgtgcggcaaaggctgtaatccagacaacagtcagaaccgctgtgccaagacgaagtttctgcacaagtacataagtgagcgcaagaaaagacaaaaaacaaagaagcatttgcagccaaaaataccagcttattgccgggaaaagactatacagcggcacaaaaagccagccaatgaaaatgttggagaacatcatgtgggcatctgggtggccggtatacgcaccggaaaccaccatttccatgatgaaatcatccgaaacctcatattttatactgcaaaaaagaagaatgcacaacagcagaaccgcctgcgctgctgctaagacgaaaaacaatttctttttgccaaagtgctcctgcaaatcgatcgccggagcgcttcgaatctgctgtacatcgtttgtcatcagcgattaccgtacattttttcgtagtaattctgatactcaccgctgatgatggtctcccaccactcacgattatcgagataccactggatggtctttttaatgccgtcctcaaacttggtctccggcagccagcccaactcgttatgaatcttggtcggatcgatggcataacgcatatcatgacccttacggtcaccaacatgggtaatcagactctccggcttgcccagctccttgcagatgatttttacgatctcgatgttctgcttttcattatgaccgccgacattgtaaacttcgcccacacgacccttatggataatcaaatcaatggccttgcaatggtcttccacatacagccagtcacggacgttcagaccctcgccgtaaacaggaaggggcttgtctgccagagcattcgcgatcatcagcggaatcagcttctccgggaaatgataaggaccgtagttgttggagcagcgggaaatggtcacaggcaggccgtaggtacggtggtaagccagaaccagcaggtcagcggcagctttggagctgctgtacggagagctggtgtggatcggtgtctcctcggtgaagaacaagtcgggacggtccaacggcaggtcgccgtaaacctcgtcggtagagacctgatgataacgctggatgccgtacttgcggcaagcgtccatcagcgttgcggtacccataatattcgtctggaggaagatgcccggatcttcgatagaacggtcaacatgagattctgccgcaaagttaaccacaatgtccggatgctcttcttcaaacagtttatttacagcttcgcggtcgcagatatcggccttcacaaagcggaaatttgggttatccatgacaggcgccagcgtagacaggttgcctgcgtaggtcaacttatcgaggcagacaatgcggtaatccgggtattctttcagtatgtgaaaaataaaattggaaccaataaatccggcgccgccggtaacgatgatcgtcataatttaactcctttcgctgtagaacttatttctgggtcttgatgttgcgaacagaacttttgatcgtaccttctgcaactgttctcaagtgcactccatacggggatttaccgtacttttccgcagaacgcagcagttcttctttatcgatccagccgaagcggtaagcaatctcctccggtgcggagatctttacgccctgacgtttttcgaccatacgcacaaaatctgctgcatctacaagactatccattgtaccagtatccagccacgcaaagccacgtccaaacagctccacatccagattaccctgatttaagtacatttcgttgagcgtggtaatttccagctcgccgcgatccgacttctccaccctcttggccagatccgacacacccttgggatagaagtacaggccggtgatggcatagttgctctttggatgctttggcttctcttccacagagatcaccttgcctgcatcatcaaattccacgataccgaagcgttctggatccgttacataatagccaaagatcgtggatatgccgttttcggctctgctgcttgcgttctggagaatgcgggagaaaccgtttccgtagaaaatattatcgccgaggatcattgcacacggttcgtcaccgatgaattctttaccgatgagtaacgcctgcgcaagcccttccggcgcttcttgcacagcataagaaagagtgatgccaaactgactgccgtcttccagcagatcgtggaagcgtggggtgtcctccggcgtagagatgatcagaatgtcccggatccccgccagcatcagggtagacaggggatagtagatcatcggcttatcgtatacgggcagcaactgcttggatgttaccatggtcagcgggtaaagtctcgtgccggcgccgccggctaaaataattcctttcactgtttgcatcctccgttttactctttggtgttaaaatataacctttatttatccaaggggaagtgagaaaatcacgattcccaatacaataattgcgattccctttagttttcctttcgtaattttctcatgcagaaagaaatagctaagtatcactacaaaaatctgtcccaaagactgccacatgggcgagagtgaaagcggaagtttacgcagcgcaatcaccgagcagactgttgataccacaaaaaggaagtatgcaaagataacagaaaaatttaagtacgctttataccaagcatcatatggcttcattgctgcttttttcagaataatctgtgaaatatccgcaatcagaacagagctgatcgcaattaggaaatacaaccacacgttacttatcccccgatgccataaccttatatatcccgtagcagatcactatcgcaccgaggatctgattccaactggtactctcttgaaacagcagtacactccataccatactccaaatcatggacacagcacgattgctatacgccgttgtcagcgggaccttgcgcaaaatcatctgccataaaactgcatatacaaataaaattccgatagagcatccataaaacagcagaaactgaattgaaatcatcgggtatcgggacgccaatttctgaaacactccgctaaaggagtatacaatcacagtgccctgcataaaaccgatttgaccaattccagctttttccttgtcatccatgccgattttcacctctgatttgcagcagctccccacttatttctacgttattgcttgcgttccattttttcaagtcagattcgagtcctttccgtttgcctgctgatacactctaattaccgcgcaagcatcctcttgtacagtctcggaacgaggcgttttcctatacaagtcatgacagagttccgtcaaatagcacggaacccctgccttctccgccaaatcaatacaaatttttgaatccttttccatcgtttcaagcgccgcacgagacgaaaaatcatgcttcatcagcttgggcactctactctggaacatattagaattacctgcacattcagagattgtatcctgcaatacctgcggatcgatccccatagactcgctgaaagacactgcctccgctgctgctgcaatatggattccaaccagcatttgattgactgccttgagcatctggccttgtcccagcttagcgcccacataaacgatcttcttggaataggcctgaaatatatccctgcatacctcaaatacctgactgtcacccgctgccatcgttacaagttttccctgttcggcaccggttacgccaccgcttaccggtgcgtctaaaagtgcaattccctctggacacatttcactgagcaggcgcatttgttccggcgcaatggtactggaaacaatgattattccctttttcattgcagccaacaccccatcagtcccctgcaggcaaccgcggcactgctcataatttgaaaccatcagcaaaatgcggtccgttcgctccgcaatttctccggcagtctccaagacctggattcccatgcgttctgccttctggcgactatacgcactacgcactgtcgtaaaaagttgaaatccacattcttgtagtttgcctgccatgggcgctcccatagcccccagcccaatgattcctaactgcttcatctgattttcttccgctccacaagttcttctgctgccgctactatgtcagcagccgtcatatgatttgcctcatacagtgcctctgcgtctccggatcttgcaaagcaatcctgaataccaatcatacgcatagaaaccggcaaattcgtagccagcacctctgctacagctccgccaagcccgccaatgacagagtgatcttcgaccgtcacaattgcgccggtctctccggccgctgtaataactgcctcgcggtcaatgggcttgagcgtatgaatctccataatctgcgcattgactccccgggcttccagtgctttcgcggcctttacagtgcggtccagcataattcccgtggcaatcagggtaacatcttttccccgacgctttacccaatttgccttgccgatctcaacatgataggttgcttcgtcattgatatcctctacagcgtcaaaaggaagccggacatacagcgggccatggaactccagtgcctttcttgccaacactctggcagaaacagcatctgacggctgaataatggtcatattcggcagggcacgaagaatcgcaatgtcctcaatggctgtatggctgacgccttccgagccagtctgcagccctgcatgagtccccatgactataacatcctgtttgggatggcaaatatacgttctgagctgttcacaggcacgcatcgttgcaaatacgctgtacgttgccagcacaaccttatgtccgcagctggccaagccgctggctactccaatcaaattttgttcagcgattccaattgaaatctgacgttccggataaatatctccaaaatcctcaaatgagcagcacttggtatctgcacacactgcataataaccatattcctcggcaagccgaatgatctccttgccaaaaataattctgattgggagctggctcatatcaattcctcccttgcatgaatttcagtaatcgcctgctgatactgctcatcggaaataacactccgatgccatttcagcacattttccatataggaaacgccttttccctttacggtgtttgcaataatgaccgtcggagagccttgatggcgctgtgctagttcaatagccgcatagatctcatcaaagttgtgcccattaatggtaatgacgttccacccaaacccatgccacttttcctccaagggagaaatatccataacatctgctactgttccggtgatttgaagtcggttccggtctacaaaagcaatcaagttatccagattatggtgtgctgcacacattgcagcctcccaaacaataccctcctgtaactctccatcgccaagaacgcaataagttttataagaacaacctcttaattttgcagaaatcgccattccaacagcagtggaaataccattacctagagaaccggactccatatctacgcccggcgtagacatatccggatatgccgtcagcatagagccggttttacggaatgtcgacagcgtttcacgggggaaaaatccgcggcgtgccagcaccgaatacaatgccggcgaggcatggccttttgaaagcacaaatctatctctctccggccaatcgggattctgcggatccacattcattacaccgcccaaatagagtgctacaagaatttccacacaagacagcgatgaacccggatgacccattcctgcccgatagatcatttcaataatatcccacctgaccgcctgtgccagctcttcatttgtaaactcgttctttttttccatatcttttcttccctccgacccgtatcagtcaaactgcttcagcacatgtgcctttttacagtcatagcccgagatcaacatctgctcgccattttcatcaagcactttcagagttttctgcacatgatcaatcaacgccagcagacgatctgcatctttcccctgaatgaagattcttgcaaatgtctggttcagcgttcccatagacccttttccgatctcatcgccttcatagtagaactgaatgatattgaggatttccggcattgcacggagcgcttccaatccatcaatccgggtgatttttcccggcttcatcagtgccagcagaattacatcactgtggtcaaacatcggcttattcttctctgccgcattccagcctgtgcatgcaccgaacagcgcataattcagcatcatctgacagctgtcaatctcattctcagctgcgcagagaatatattcctgtgcgccgcacaggcgatagcccatttcaaaaggcaacagcatgccatccaccacaaagcactgcataaacatcgtgccgtccttcatgccgagacctgctgtcatatttttcagtttctcctccagctgttcatagtagagcggaataaaccggcaggggtaaaacaacgcattgggctgcatggccttcccctcctgcacctgattcatgtcacgctcgcacatggaagacaacgacagtacaccattctgaagattaaagtacatgcacacatccggataggcagccatataccgctccacgatcacgcactgattctgcgaaaatttcagtgcatacggaaccgcttcgcaaagctctttctcattttcacagattgaaacacccttgctagcccacgcatctgatggcttcacgatcaccgggtattggatcagctccagatcttcccgtttcaggtcaccatccaaatggaactccggcaccaccgggatcccatattctctgcaggtctctttgaacagcagtttgttggtggttacattgatttgctctttcgttgcataaaacggaagtccaagcgtatccgccaccaggcatgcaggcatcaagttcgcatcagaaaatccagtaaacacaccgtctatctcattttcccttgcaatttccaacacccgatcaatatctgtcgtgctggccaaatatgagcggtccgcaatccgctttgcaggtgaattcggataataatccactacaatcgtatagatacccatgcgtttcgcacgttcaaccgcatcatacatggctcctgttccgccaagaaacaggagcttcttctggttttccatagtctcagcttctttcattgttattccatcgttattccgtcgcaatataaaacccatataccatcaggtcattcacgctgtccacccacgccattgtaacattgggattgtaatggcactgaatgaatgccagttcccgctctggcggaaccgtacatatcatgtataccaccgtgccctcaccaattgcctgatagacattgggcatcccccatcgttccaaaacagaaagattggcaggggtccagcacacccaccccccctgaatgcatacattctggtggctagttctggagaaacaggtaaatggtgttgccgtgctggtataggtcagacgtgaaatcgttggcctgtccagcaggaaaaaatcatcaggatatgattccgcatactcaattactttctgataggtatcggtaatctcagctgtgtcatcttctgccgcatgacaaatcgtcaggacacacactgctgcgcaggtcagaatcagcagtgtgcagcccatatcgtgcccaacaccgcccaatgttgtccagatatttttatctgcctgatccacgacacttcgtttccgccagctcagggttccaagataaatacagaacagcagcgccggcgcagtgatcgaataccagactctgtatggcattcgtcccacagaaacaaaataccacatcatcacaaatgccacaaccagggtgcccagcagcaacaggaagcgcttccaatccatacaaaacagcagaaacagcacaaccccaaagaaaaggagccaaaactgccgctgccgaacatcatctggtacctgaaaaaccgctgcaattgcttctgttttaagattcactgcggaataggaagctgactgttctgatttcataccaaccagtgcttccacaacatcccggttgaacacctctttatccagatagctttggttcgcgaacatatccaaatcctctctggatattcccaaagccatcaatgcctccgcattttcatcatagtctggaacaccgtaatccagcagttccgcacgcattgcattttcctcataataatccagcgcagcaggattactacggtaatacgccatatttgccgtgcgaactccaaccgctaccaaaacactgatacacataaccgcaagtgttttccagttcttcttcagccacgaaagtaacggcatgtccttgtgcgcaaacagcacttcatatcccgcaaacatcgcaagatacggcaatgtaaagtatagggactgataacgcagcatgctgcccatcaacatgagcacgcacccgccaattccacggaacagtttgccctttctcgatgtctcctgcagcatatcggccagcagaactgcccccaccgcaacatataacgctgcgttctgggtaaactgaaacacaatatagtgactctcgcaaagcgctcccacaaaaattatagtcaacgcagccccagccggaaagcgctttgcccggtgcatcaggatataggatgctgttgccagcgaaataaaggaaactcccacagagattatgacataccagttggcagcattattcgtaatcttgtaaagtgcagccaatgccttgcataaaaacacatttacaaaagcaatatagtatccgtcctcgccgccatagacattcgccagcaaattgctgatatcacgatcatcattcgtaccaaactgcatatggctaaagcaccggcaaatcagtaaaaacagtaaatttattcccagcgcacacaaaatctctctgtgctttttcagccagcttgcaaatgtctttgtcacgcccggactccttcccgctcataattcagcaccgtccgaaccacatattgcggctgttcacattgaatcaggaacacccttccaatatatgcacccaaaatggaaagtgcaaaaaaaaggcatcccccaaggaagaacattgccccaagaaccgcccagaccgctgccgactttcccattacatccattacaactgcgcaagtccacataacaaggcttaccacacaggatgcgattccaaacattccaatcagacgaagcggcactgtggaaaagcttaaagcgccatcactccatagcttcaaaagctttttcagcgtatagcccgactggccttccagccgctcatgatgctccagctgaacatttacaatttttcttgtatgctgaagcacgtagccaaacatcgagacaaacggggtatcatattcttttaatcgttcaatcagaaatttactgtacgccgcaaaagaagacgtatggatattcttaggcttttgcagtgtcaggcagagcatctctgtgttcagccaactggtaaagcgcttaaacagcgtatgctttttcccatggaactccgcaattgccatgtcagctccggcttcaaccgcctggaccagtggaaaaattcctcgtgcgtcatgctgcccatcatcatccatatacaccagtacgtcaccctgcacatagcgcagcgcagccatctttgcagccgcctgaccaaagtttttggacaattctactcctacgatccgaggatcctccctgcaaagcgtctcaattgtctgaaacgttgcatcttgatccggagaaccgtcattcaccagtaccagctgatattcatattccttatggagtgaaaactgattttgaatatctgccacaacatgcggcagtgtcttggccgatttgtaacatggtatggccacagtcacaagcataaatcacaatccccttttggcgagttaccttaccgttatttattttgagcgggctttcgttgccgcagtgcagcagcgaatagtagcccgctgctgtgcgcttacctccagaacccctttacagtctccaccactgtattgacctcttcctccgtgagcccgtaatacataggcaggcgggtcagccggttgctctccttggtggtataaacgtctttgcccgcaaagcggccaaacttcagtccagcctcggcggaatgcagagggacataatggaacatggagtaaatatcatgctccttcagataggcgatcatggccgtacgctcctctagatcacgaagcttgatccagaacatgtgcgcgttgtggccgcagccctccggaatgtgggcgatttccaactttccctgctgctccagcggcgcaagacgctcctgatagtggtgccaactggcaagccgagcgttgttgatcttctcggcctcttccagctgtgccagcaggtaggccgcattcatgtcagagggcaaatatgaagaaccatagcccacccaagtatacttatccacctgcccccgcaagaaccggctccggttggtgcctttttcccggaggatctccgcagcctcattcttctcttcatcgcggatcagcagtgcaccgccctcgcccatagagtagttcttggtctcatggaagctgaagcagccaaaatcgccaatggtgcccagcgccttgccatggtaggtactcatgacgccctgcgccgcatcctctaccaccttcagattgtgctttctggcgatttccatgatggtatccatctcacaggccacgcccgcatagtgaaccggaacgatcacacgggtcttatcggtaatggctgcctcgatcttggtctcgtcaatgttcatggtatccggacgaatatccacaaatacaagctttgcaccagccagcacaaaggcattggccgtagacgagaaagtaaagctgggcaggatcacctcatccccgggctccagattacaaagaagagcagccatctccagtgcgtggctgccagaggtagtcaggagcaccttctggcttcctgtcatctgctccagcaattggtggcatttctttgtaaactgtccatcaccacaaattttatgcgctctgattactttggaaatatactccatctctttgcctatataaggcggtctattaaaaggaaccatgtttcttcccactccaaattaattgtttaattacattttaacatataattcgacatattgcaaccgatatgaagtatttttaatgcctttctctgcgttgtagatagatacgacccacagaaggtaaagaaaagagggatagaaaagaatcaggcgttagaaagaatttcacagaggagatcaagagggctttctgttgctccagcgcaaatgatctttgcactttcggtttagatcttttacacttacaaacttttcccagttgtaaaaatagcgctggtcgtttcgatgactccgctctaccttgccgttgtgccaaggtgttctgggcggaatcagcttgtgctgcacaccggcgttcttcaaagcaatgtcaaacggacagagtggaacgtatgccttttttgtttacaccgtcacatacggcagcagtttctcaagcagcttttcgccgatgccttttacattcgtgagctcacgcacatctttgtatccaccgtttgcttcgcggtattcgatgattctgtcggcgagtacttctccgatgccgttcaggccaatcaactcttccttcgacgcggtgttgatgttgactttttcttcgcttaaagcggatgcagccggcgcgctcgatgctgcttcgctttgccctgtcgatgtcaccctgtacggttcaagcggtgtattctcaaaggaaacgcagaacagcaccgccgcacacgccattaaaaacagtgcgaacagtaaaattgtccgttgacttcccgcgcgcacaagcgctcccccttatttgtcctccgcatgcagcgtcttcacaaaatccgtaaaatatggcggcagcggcgcttcaaactccatatattcgcccgtgcgcgggtggatgaacccgatgagccccgcgtgcaggcactgcccatgcagctgcgtgatgacttttttcggtccgtagaccgggtcgcccgcgacaggatgcccgatatacgccatgtgcacacggatctggtgcgtgcgtccggtctcaaggcgcaggcgcagctgcgtaaatcccgtaaaattttttgtgacaaaatagtgcgtcacggcgtttctcgcgttcggcgtgttttgtaccgccatgcgctttctgtcctgcggatgacgtgcgatgggcgcatccaccgtgccgtcctcgcgaattttcccgtacaccacggcgcggtattcgcgcgtaaagctgtgcgccttgatctgctccgccaagtgccggtgcgcggtgtcattcttcgcgacgatgagcagcccgctcgtgttcttgtcaatgcggtgcacaatgcccgggcgaatcacgccgttgatgcccgaaagcgaatcgccgcagtggtacagcagtgcgttcacaagtgtaccgtcataattgcccgctgccgggtgcactaccatacccttcggcttgttcaccacaagtaggtcgtcatcttcatatacgatgtcaagcggaatgttctccgccttcacgtcgagcgggcgcgcttcgggaatctccacgcacaaaacgctccccggcgcaagcttcgcgcttttctgcacaatcttattatcgcaggtcacgtgcccgtcgcggatcaaattctgcaccgcagagcgggaaagctccggcagcgcctccgcaatcagcttatcggcgcgccagcccgccgctgtgacctcaatctcatgcagctccgccatacttatttcccgaccccgtcggcagtcgtttccgtcggctcgttcacttttttatctgccgcttcttttttgtctttaaagaataagtaccacacggcaaacaaaatcgcaccgaccaccacgcagcagtctgcaaagttgaacacatacggaaaaaacagcacatggatgtaatcgaccacatagccgaaaataaaacggtcaatgaggttaccgatgccgcccgcgatgatgagcacgcacgacgtgcgcgacatccatgtgtggtgcttatagcggaacaaaagcacgagcaacgctgccataagccctatcgtcagtatgatcaaaagccacgaaagcccggcaaaaaagccgaatgccgcaccgttgttttcaaggtaacggaactccaaaaggcccggaatgcacgtcacgctgccgatgggctttaagtttgtgataaccgtcatttttataaactgatcgacagctgtcagtacggcgatcagcaaaagaatgagaatggacaaaagaaatatccccttataacccgaaaaaggcgcaagccgggcaaaaccggtttgcaccttggttcggttcaattattcaacagcacggcgtcattaagcacgtaccgtttaaaacaaattcaatgtgtccgaaattattcggaaagtgcttttgcgcagcgctcgcacagatccacgtatgccgggtttttgccgaccgtggaggaatatgtccagcagcgcatgcacttgcagccttctgccttatcgacctgcacggagaggccaagtgcatcgtcggaaagtgtgccgccctcgccgtccacgatctcgacctgagatacgatgaacacggttgcaagctcgtcttccacagacttgaggaacgcatacagctcgccggtgcagaacagcgtgacctttgcatcgagcgatgcaccgatcgtcttctctgcacgtgcgttttcaagcgccttcttcacaacatcgcggattgcatggattctatcccagcgtgcgatgaattcttccgtcacgtcgatgccgtacttttcgctcgtcggcttcggcatctcgttgtaaacaacgtggcgtgcatcgcaatcggaagcgtgcggcatgctctgccagatctcgtcggaggtgaacgccaagatcggcgcgaccagacgggtcatcgcatcgaggatgatatacatcgcagtctgcgcggcgcggcgtgcagcggagtccttcttctcggtgtacagacgatccttgatgacgtcgagatagaagttcgacatatccacaacgcagaagttatggatggcgtggtaagcctggtggaactcgaaggactcatagccctcgcgcaccttcaccatcagccgatccaaacggttcagcgcccacttatcgatggaaagcatctcagaaacctctacactgtcggtatccggattaaaatcggaaaggttgccgagcatatagcgcgctgtgttgcggatctttctgtatgcatcggaaagctgtttgaggatttccggggagatgcggatatcggcatggtagtcggaagaagcgacccacagacgcaggatatctgcgccgtacttatccacaatctcctgcggcaaaatgccgttgccgagggacttactcatctttctgccctgaccgtccacaacccagccgtgtgtgacgacagccttgtacggcgctttgccgcgccatgcaatggacgtgagcagcgaagactggaaccagccgcggtactggtctgcaccctcaaggtacaggtcagccggccaatggagataatcgcgtgtatcgcaaacggcagcatgggtcacgccggaatcaaaccaaacgtccatgatgtcgcgctcttttgtaaaggaggtgcagccgcacttcttgcactttgtgcctgcgggcagaatttcttccgcttccttgatgtaccaagcatcggagccctctgcgcggaacagctcggaaactgcgtgcattgcgtccttctcgatgagcggctcgccgcagtccttgcagtagaaaatcggaatcggcacaccccagcgacgctgacgggagatacaccagtcgttgcggtcacggaccatggaggaaatgcggtcttcgccccaacccgggatccactttacgcccttgatggcttcaatagcctgatccttgatagcgtccacggagcagaaccactgctcggtcgcacggaacagaaccggcttcttgcagcgccagcagtgcggatactggtggatgatcttctgtaaagcgaacagtgcgcctgtatcctcaaggtgctgtgcaatcgccttgttcgcttcctcggtcgtcaggcctgcaaactggcccgcttcctcggtcatcttgccatggctgtccaccggcacaacaatcggaatttcgggatagtgattgtggcagacgtcatagtcttcgacgccgtggcccggagccgtgtgaacgcagccggtaccgctttccaacgtaacgtggtcgcccacaatgacaagagatgtgcggtcgatgaacgggtgcgccgtcttcatatactcaaggtcgctgccctttaaggtgccaaggatctcgtaatcggtcttgcccgccgcctgcatggcagattcggtcagggccgttgccatcacatagtattcgtcgccggactttacaagtgcatattcaaattccgggccgacgcaaatcgcgacgttcgcggggagcgtccaggtcgtcgtcgtccagattacgaagtaggtcttactcaggtctgcgcccatcggggtcaaaaggcccttgtcgtccgtcacgcggaacttcacatagatggagtggcagggatcctctgcgtattcaatctcggcttccgccagtgcagtctcgcactccgggcaccagtaaaccggctttaagcccttatagatgaggcccttcgtcgccatttcggagaagatctcgatctgctttgcttcaaattccttgcgcagggtgacatacgggttgtcccattcaccgatgccgccaagacgcttgaaggagttgcgctgctcatcgaggtagccgagggcaaactcgcggcagagcttgcgcagctcgatgtcggagattgcagtggaattcgaaacgcccgctttctttctggccttcagctcggtcggcaagccgtgggtatcccagccaggaacgtacggtgccttaaagccggacatattcttgtagcgaacgataaagtccttcagcgtcttattcagcgccgtgccgaggtggatatcgccgtttgcatacggaggaccgtcgtgcagaacataaagcggcttaccgtcgttcttttcgagaacggtctcgtaaaccttgtcttcataccacttttcgagcattaccggctcgcgcttcggtaggccggcctgcatggcaaagtcggtcttggggaggttcaatgtgcttttgtaatccatatattgatccgtgcctttctgctggttttatcttctcttaaatttaccctttttcttgtcgccttcgtcttcaacgccgaactccagcgtgctgaaaagggcctccttttctttctgcaaagattccgggatgtcggcgtaagcgttcaaatcaaggccgatgccgctgaactgctccttaatgtaggagtccttgtcgtaaacaggctgcggctgtaccggcgccggtgcggggatcggctccgggacaggtgcgggagcgggcttcggctctgcgggggccggtgcgggttcatcttcgacctgctgtgctgcaggcaccgggatttcttcttccggctcctcaatcacttcgggttcggtgtataccggcgtcagttcctcggcgggcgctttttcctcctgctcttcctccggcaggtcaaacgtcggaatcttctcaatcacggcaaggtgttctttatagatgccgtagagcgaagcacggaagtttgtcacctcgcgcttcatgttctccagctctttctcttttgcggcgatctgcttttcataggacttcacaagcgtttcggagcggcccttcgcatcttttacaagagcgtccgccttcgcgtttgcgtcgttcacaatcttctcggccttcgcctttgcctcacggatggaagcattgccaaggcgctgtgcgctgagaatggcatccttaataccgtcttcctctgcacggtaagactcaatttttgcagccaaaatagaaagcttctcctgcagctcggcgtttttcgcctgtaactgctgcacagcggcggaatcatccgtcttgcgcgttttaatctctgcgttttcctttgtgagcgccgttacggtctccaaaacttcatcaataaactgatcgacatcatcagaattgtaaccggaaaaatttgattttctgaagctgacttcattgatgtctttaatcgataacatgtgtgtaagcctcctatatgtattttctgcatttcacagataaacggccctttttcgtgaccgggccgagcatatcaacaataaatcgcccgcagcggcgtatggagatgatgtctccttcatttacacggtgcgaaacggaatccgtctccctatggttgacggaaaccagacccgcgtgcaccatctgcgcggctttttccctgccggtacccgccaaaaaggcaaccaagcagtctaagcgttccgaagcgaccacgccgcccatcggctgaaagctgtgcgcctgcggcagcggatctgtaaagccctttgtaatctgcacccccacccgaccgatcttatcgatctgcgaaagaaagtgcggcgcaagctctgttttcacaaacagcacggcgcgcccttcttcggccagaatatcgccgagcgatgcacgcaccacgccctgtgccagaaatgagcccataaaatcgcggtgtgaaagcgcatcctgccggcgaaacttcaccgtgagccccgtcaccgggaactcctcatctaagggctccatataatccggaaacacgcccaaaaccgttcgctccgcttcaggaaagccaccgaaaaaccggtaattttccgcatgcgcacggcgcaaatattcttctgcgtacgcgcgctcggaaagatccaaaaagcccaaaaacgccggcctttttccgccaaggcgcaggcaatcctctattttcgcttcaaaaagcttgtcttcctgtgcggccatatcagaacgttacgccgttctgtgcaagatcatcgcgaatctccgcaccgctcaggctcacgcccgcaggcgtgaaaatatacgtcttcgcggcgatgggtctcacctcgccgtggttcgcgtaagaagcgccgctgaggaacgccagaatatagcgcgcctcgcccgcgttcgtctcttcaaaattcacaacgaccgtatggccctggttaatctcatccgcaatgctatttgtgtcgtcacggaaagagttcggcttaaacacaaccacctgtgcgcctgcgcgtgcgtggttaatgttcacaacgcggttcgagcttgaagaggagaacgaacggcgtgcggaaggctgctcctcgcggctgtctgccgtgggctccgtggcctcgtcctcgtagtattcatcatactcgtcgtcgggcgggttccacattttctgaagcttctctacaatgcctgccatatattatacctccattttctgcataacagggtcggtcagcgcgtgtagtcgcgcgggccgaaaagcgaagagccgatgcgcaccatagtggcgccgcactcgatggcctccgcgtaatcggaagacatacccatcgaaaggcaattcataaatacattatctatttttttggcgcggatgtcaataaaagattgatgcatttgggaaaaataattgcatagcacggatttttccgcacaaattggtggaattgccatcaatccgttcacctgaatgcccggcagcacggcaatttcttccaataacgcgggcaacgcagctttttcgatgccgcccttgctttcttccccgccgatattcacttcaatgagcaccggcattttgcggcctattttctccgcaaggcgggaaatttcctttgcaagctttacggaatctaccgactggatgcagtcgaccttatcgatgatatatttcaccttgttcgtctgcaagcgcccgatgatctggccggaaacgcccttgtcccaatcgatcttttcatatttgtccatgaattcctgcacgcggttttcgccgatgaagcgcaggccgcagccgatggcgtggttgatgacctccgccggcacggtcttcgtcgccgcaagaaacgtgatgtcctcgggctttctgccggagcgcaccgctgcctccgcaatgcggttcgtgatgaccttatagttttcctctacgtccctaaaacgctcctcaaagcatttttccgtcataaagatccgtcccttccacaatgacttcatcgtaaagctgtatcgttctcgaggtgacgagctgctctttttccgaggaggaaaggttcagcttgcacacggcatagccgtcgatcgtcgcatcggagaatacctgtacaaagcgcacgcggctgccggacttgatgtaaacacccttcacgttctgttccacatgctccgtcacattgccgtccgtgtccgtatccgtcacggtcacatccgcaaagtggatggccttttcgttcacgagcacaccggcatacgactgtaaatcgatgcgcagcggctccttgcgcgcggcggcaaggtctgtgttcatgtaagagcacttcaaaatggccactgcgtccccgctcgcttcgtccctattgatcttcacgacctcggccgggattgtctccgccgtcgcaaacggcatctccaccttcacattcgtcgtgcggtcaagccgcacaaggtcgttttcatcgatgatgcacgcaatgtaccagttgaattcctttgccaccttgccgatgaccgtgctgtccgcattgctgcccgcttcgccttcctccagcgcacgcacatcgcttacggtcagctgctccacatcgtcgatgtccaccgcgttttcgtagccgtccaccgtatggataaaataaccggaagccggcgacgttaccgtgccggtgcttgaagaggtcgtcgtctccagcgttgcacgttccgatttcaaattctcaatgtgcgccacatagctcgcggaatcctccgcgcccgtcacgatctgcttttggcccatcaagaggtacaggtcgtttttatcgttcgagatcgacgaaaacgcaccggatttcaaatcggaaagcagccctgtgaccgttttattgatctggctgccgatgttcttcgggttcgaggacgcgacctctgtggggttctccagcacggctagccgcgtaagctcctcgtcgatgcgcagcatgcggttgtgtgcggcggcgtcctcttccgcggggtacagctctgctaccgtgccgccgaacgccgttttctctccgtcgtcgagcgtgtagttcaaaacgccgtcgtaccgcgagtacacaagctcctcattgcggataataaagcccgtggtgtcgatggatgcggaaaggtcagcgtacatggccgtttccgttttaaatccggtgtattggcttctgtaaatctggtagcctacatatatcaaaagcaaaatcgccacggcgatcgaactgattttacgaaataatgtgttgcttcccatagcggggcttcctttcagtcttcaaaatgcgcgcgggctatgtcctctgccgcgcttatcaggtctgccggggcatcaaaatcatccgcaaaaagccacacggcatcttcctcccggcggaaccacgtcaattggcgcttggcatagcgccgtgtttccctttttatattttcctttgcttcgtctaaggagcactgcccctcaaaatacgggaacagctccttgtagccgatggcctgcacggaggtctgccccggcgtgccataccgcttaaaataatcctcggcttcttttaataggccgtctgcaaacatctgctccacgcgcaggttgatacgcccgtaaagcgtctcgcggtctctgaaagacagcaccaacattttcccgtcatacggcgattccaccgctttcgagtccttcgcctgcttcgagaacggctcgcccgtcaccatgcagtattcaagtgcgcggatgaccctacgcatattattcggatggataccctcggccccctcggggtcaagctcttttagccgcgcataaagcggttcaatgccgtctgccgcaaattccgcttccaaattaccgcggatttcatcgtcacggctgttttccgtaaacggcaccgcctttaaaagcgagcgcgcatataagcccgtgccaccgacaagcaacacgtttttgccacgcgcacgtatgtcttcgatcacctttcctgcaagcgccacatagtcgctcacgctgaacggctccgcaggatcctgaaaacccatcaggtggtgcggcacaccctgcatctcgtccgcggtcggctttgccgtgccgatctccatgcccctataaatctgcatcgagtcacacgaaaccacctccgcatggagctttttcgcaagcgttacggaaagcgaggtcttgccggaggccgtcggcccgcacaccgcgaataccttgattttctcttgtacttccgtcattccggcgccccctttttgtttacataactttataataacacaactttcatccgtgtttgtgagcaaaccgttacactctgccgaattctttttccagcgttcgctttttcagcatcacgtagatcggcctgccgtgcgggcagtagcgcacatcggggttcgcttccagctcttccgcaagtgcaatgagctcctcttttttcgaggcgttcccacccttaatggctgcgcggcacgcaatgttgtggtacagccagtccatgtgctccgtcgtcgcgtcggtcttgttttcttcaaggtatcccgccatttcgagcacggagtccttgatgtccgcaccgttcaaattaagcggcgcgctgcgcaccaaaacggtaccgctgccgaaatcctccacgtcaaagcccgcctgctcaaaaacactcaaattctgcaaaaccgccgtgtactcgtttttgtccatcgtcaccgtcacgggcacaagcagcgtctgcgccatagcagcttcttcgcgccgtttgagcttttcgtacagcagtcgctcatgcgcggcatgcttgtcaataaacatcagcgtctgcgcgtcgtattcaaggatgatatacgtgtcaaacacctcgccgatcaccttatgcgccatgcggggtaaatcccgctccgtctccggcacaatgcatgtttccggctgtgcgttgctttccggattttcctgcaccgcttccgtctgcacgggtgtttcctcccacgccggcggcacgggctccgtctcgggcggctgcggtaagggcggttcttccgttatcacttccggctttgtcatcggctgcggctccgcctccaaaacgcgctcgatcgacgtacgaatactttcaagctgcggcttttcctcccgctctgcgctgtccgaaaacgtatgcggcatcggcggcatatcaacgggcggctcatacggcgcttccgcctcttttttgctcgtgttgataacgggcgcagacttcacgaccgacgcaggcatcggcttcaccgtctccgttttcggcggcggattcagcaccatttgctgcggctttacgaccacatccggcttatacgggtcaacaggccgccttgcgtgctgcgcaaggtcaacggacttcatatcgcggctcgccgtcacggcggatttcaccccgtggtacaccgcatcaaacaccggacgctcgttcacaaagcgcacctccagcttcgccggatgcacgttcacgtcgacgaccgacgacggcagctcgatgtgcagcacgcacgccgggaatttacccaccataatcgcgcccttgtacgcttcctccagcgccacacacgccgtgcggctgcgcacaaaacgcccgttgatgaagaaattctgcatgctgcggttcggtcggctcgcaatcggcgacgagatatacccgtgcacgcgaatgccgcccaaggtataatccaccggcagcaaagcgccggaaaactccttgccgaacaccgcatagattgccgagttcagcttgccgtcgcccggcgtgtgcagcacttccttgccctcgcgaatgaggcggaacgagatttccggatgcgaaagcgcaattttgtccatcagccccgccacggagttgccctctgcggtgtctttcttcagaaacttcatacgcgccggcacgttaaaaaacaggtcgcgcgccgtaatggtcgtgccaagtgggcagcccgcgtcttcgatctccacgtcgctgccgccctcggaggaatagtgcgtgccgattgaactgtccgccgtgcgcgtgatgaggtcaacgcgcgacacagccgaaatggacgccagcgcctcaccgcggaagccgagcgtcaaaatcgcgtctaagtcgtccttttcgcgcaccttgctcgttgcatggcgcagaaatgccgtcgccacgtcctcgcgcgcaatgccgcagccattgtccgtcacacggatatacgtcacgccgccgcggcgaatttccaccgtgacaatcgacgcgccggagtcaatggagttttccacaagctccttaatgacggaagacgggcgctccaccacctcaccggcagcgatcagctccgcgacctgcttttccaaaacgtgaattttcggcattttctgcaccttcctttcgcgttaaatttatttcagcatatttgcaagttcaaacaaaatgttcatggattcgatcggcgtcagcgtgttgacgtccaggcttttcaggcggtttaaaacctccgtatcctttgtcagcatcgtcagctgtatcggttcctcctgctgcactttcacggcgtttttcggttttttcaccatctcgccgctctcaaggctctttaacacctctttcgcacgccgcaccaccttgtccggcacgcccgcgagcttcgcgacctcaataccgaagctgtcgtccgcgccgccgcgcacgatacgccgcaggaacgtgatgtcgtccccgcgctttttcaccgcaatactgaagttctgcacaccgggcaaaaggtcttccagctccgtcagctcgtggtaatgcgtcgcaaacagcgtcttcgcaccgcacagctttttgtcgtgtacgtattcgatgaccgcccgcgcaatgctcatgccgtcaaacgtcgaggtaccgcggccgatctcatctaaaatcagcaagctgtccttcgtggcgctcttcaaaatttccgccacctcggccatttccaccatgaacgtggactgccccgccgcaaggtcgtcagaagcgcccacgcgcgtgtagatgccgtccacaatgccgatctccgccgcgctcgccggcacaaagcagccgatctgcgccatgatgacaatgaccgccacctgccgcatatatgtagatttacccgccatgttcgggcccgtaatgatagacacacggttctggttcgggtccatctcaaggtcgttcggcacaaacggcgtgctgcccgtcagcagcgcctccaccaccgggtgccggctgtcctttaaatacagcctgccgttcgccgtaatggtcgggcgcgtgtagtcgttccgcacagataccgccgcaaacgatgccaaaacatccagctccgcaatcgccttcgccgtctcctgcacgcgggtcagctgccccgcaatcgtcctgcgcacttcttcaaacagcttgccctcaagtgcaatagaacggtcgtgcgcacctaagatgcggttttcaagctcctttaattcctgcgtgatgtaccgctcgccgtttgcaagcgtctgcttgcgcacgtagtgctccggcgtcttgtccttaaacgcgttcgaaacttcaaggtaatacccgaacacgcggttataccccacgcgcagtttcggaatgcccgtcgcttcgcgctcgcgcgcctccagctcggcgatgagctgcttgccgttcgtcatgtcacttttcacttcgtcaagctccgcgttgaagccctcgcggataatgccgccctcacggatcgtgtgcggcggctcctccacaacggcgcggtcgatgagttcgcaaacatcggagagcacatccatgcggctgtcgatgtcgcgcagcatcgtcgctttaaacgtcgcagaaagcgctttcagctgcggcaagcgcgtcagcgccgaccacagcgcacgcaggtctttgccgtttacagagccgtacaccacgcgcgtcataatgcgctccaggtcaaaaatgcccgtcagcgcctcggtcacatcgtctaaaagcgggcggttctcaaacagctcctccaccgcgttttgccgcagcgtaatgcccgccgggctcaaaagcggctgctcgagccatgtgcggataagccgcttgcccatcgccgttttggtcttgtcaagcacccacaaaagcgagccgcggcgctccttgctgcgcatcgtctcgagtaattcaaggtttcggcgcgtgtttaaatcaagccgcatcgtcttcgcctgcgaatatatgcgaatttcctccatgcgctccaaacccgtgatttgcgtgcggctgagatactcgagtaaagcgctcagcgccgccgtgatctccgggaaattcaaaacgtcggagcgttccaaaacctcggggtgaaactgcgccttcaccgtttcttccgcgtgcagcggttcgtaaaccgcaaaatccatgcactcgagtgatgccgaaagcttatcggaaatgaatttcgccacgtccgtcaaatcggtaaattccgggttgatgaggatttcgcgcggcgtaaatcgcgacagcgcgtcgatgaccgcgcgggagagcgtctcacccttctccgccgtcagcgtcgtcgcctccagctcgcccgttgaaatatccgcaaagcagatgcccaccttatcaccctgataatacgcggaagcgatgtagttgttcttcgcctcgtcgagcatgctgctttccataacggtgccgggcgtgatgacgcggataacgctgcgctttacgatgccctttgcaagcgccgggtcttccatctgctcgcagatggcgaccttgtagccctttgccacaagccgcgcgatatacgtctccgcgctgtggaacggcacgccgcacatcggcgcgcgctcctcctggccgcagtcacggcccgtcagcgtcagctccagctcacgcgacgcgattttcgcatcgttaaagaacatctcgtaaaagtccccaaggcgaaagaaaaggagcgtgttcgggtacttttccttcacttcaaagtactgtttcatcatcggggaataatcagccatgcccggcctccatatcgttaagattcagtcaacaagtgaattactaccaaaggcagatttttgtaaagtaggtgcgcgagatgcgccgtcagatttttcgtcatgagcgtatacgccttgcgtagtaaattccgcaggcaggctggcgcctgtcaaggactttacgaccggtatggcggaaaagatgcaagcagatcacgtgcaaactttgcaaaattctgccttagtggcagccaccgccgcaggtcgcacagctgccggtgcagccgcaggcatcgggatcgcagccatccgggtcctgaccctccgcgcacatggaaagcacacccgtcacgcgctgcatcagcgcatcaaactcgttctttgccgcctgatacgccgccatgtgctcgttctgcatcactctgccgtaaatctcgcgcagttctttgttgtactgctcgataagctcctcgctgcggtcttcctttcccgcctcgttgttgatggccatgcgctctaagttgaattcgccgatggcgttctgcaaagcttcgtcctcgttgcactgctgctccgcaacgctcatgttgatgtaggtctggtcctgctgcaaagcgcggccgagttctcttgtcagtttcatgatatccatagtaatagctccttaaaataaattataaattttattgtattttgaaaaagcaatgggtcaaaacccgttttgcttagtctacacattcgccgcgcaaaatccagttgcgcgcttcggttacttttacatttttgaattcgccgatccattcgtcttcgccgggaaattccacaatgatgctgcttgcggtgcgaccgctgagcaaaccgtttttctcgttgcgctcttcaatgagcacacgctccgtgctgcccaccatggaagcgcagcgctttgcggcgatctcctcctgtgtcttcaaaagctccgagaaccactgcgttttctccttgtacgtgacagggtcttccatttcggcggctctcgtgccggggcgcggcgagaaaataaacgtaaagagcgacgtgaactccacctcgcggatgaggctcagcgtctcgcagaactcctcatacgtctcgccaggaaagccgacgataatgtcggaggtcagcgacagatccggcattttctctttcgcatagcggatgaggtcaaggtatttttcgcggtcgtagtggcggttcatcgcctttaacacacggctgctgccggactggcacggcaggtggatgtagtggcagatgtgccggctctccgcaatcgtgtcgaacagctcatgcgtcgcgtccttcgggtgcgaggtcataaagcgcaaacggtagtcgccgtcaatcgcgtcaatgcggcgcagaagctccgaaaaattcactttctccggcaagcccttgccgtaggaattcacgttctgtccaagcagcgtaatttctttgtagccctgctcaatgagctcgcggcactcggcgacgatggcatccgggtggcggctcttctcccggccgcgcacatacggcacaatgcagtacgagcagaaattgtcgcagccgtacatcacggtcacccacgcgcgtgtgttgccgtcgcggcgcaccggcagaccttcaatgatctctttcgattcatgcccgcgcaaaaaaacgcgcttcgagtcggtcacggcggtgtacatcatctccggcagtcggtggatgacgtgcgtgccgaacacgatgttcacaaacgggaacgacgccttaatgcgctccgccacgcgctcctgttccatcatgcagccgcatacggcaatgagcagcgacgggttgcggcgcttcacgtttttcagcgcgccgatgttgccgaacacgcggtcttcggcgtgctcgcgaatggcgcaggtgttgaacagaataaaatcggcttcatcttcatcttcagtgaattcaaagcccatttcagagagcatacccttcatgcgttcgccgtccgccacattctgctggcagccatacgtgcgcacaagcgccttcggcgtgccgtgcatcgcgcgcacctgcatgatcgccgcaacgtccgccgtgtatagcttctgcttttgcagctcgtctgccgtaacggtgatttctttatccttcaaaaaacattctcctttatcgcacgcagacaagctgtctgcggtaagctgtcataatgatacagagtatactataccacaaatcggcatgattcgcaaggcgaaatccaccgtttcccaatatttacaatttcgcaacacgtatttcccgcaatacgcaaaaacggcggctctaaaaaccaaagccgccgttaaacttattcgattgtcactttcgtgccgcccgcgctgcgcacggagagcacatagcagctcttttcgccaaacacgctctgcatctctgccttgaacgcatccagcatatcgagcggcacatacgcctgcaccgtgccggcaaaaccgccgccgtgcacgcgatacgcgcccttgccaccgaggatcttcgccataagcgccaacgcgagggacaagccctgctcctgcggattcacaactgcgaacacattctgcaaattcatcgccgaggaatgacccgaggcaatcacgcactgcttgaacgtctcaaaatcacccgctttcagcgctgccacttcctgatccaccacacggttgtcgtcgaagaagtgaatcgcacgcaaaatcgcgcggtcgccgacttcttttctgagctcgggaattttcttataaaactcctcctcgcttacctcgcgcagcacttcgccgccaagcgccttcgcaacgcgcttcatctccgccggaacggctgcgtattcgccggtcaggtcggcatggtttccgcccgtatcgacgacgcacagcgcatagccgtaacggtcaaggtcaaaatcgatcttctcaatcttcggcgcggaaaggtctttaaagtccatcgtcgtaaagccgcccacactcgccgccatctggtcgagtaagccggagggcttgccgaagtacacgttttcggcaaattttgagatctgtgccgcctccacggggtcaatcgcgtcgtcattatacaggtggcttaaaatcgtcaccacaagcacctcaaacgccgcggagcttgaaaggccggagccctttaaaactcttgaggtcgtcaccgcgtcaaagccgcccacttcatagccgagcgcctttaagcgtgcgcacacgccgcggatgagcgacgccgagcgctccttttccgcttcctgcacgttaaggtctgccgtatcgaccgtgtccatcgggaacccgacggatttcaggcggatcacgccgttctcggtcttcttcaccgccgcaataacgtccagattcacagccgccgccagcaccttgccgttgttgtggtcggtgtggttgccgcccacctcggttctgcccggcgcactgaaatatgaaagtgcattagcatccccgaactcctccgcaaagtaagcggaaagctcctcatagcgcttctgctgctcggtcgcttccgcgccgtacagtgttttcaaatcgatgaccatgttgaaaaacctcccggtttattttttgagcatctgtgtaaattttaatttatgtactttagattcgataaacgggcggaacctttccaacgtttccttttccatatcttcttttctgaataccatggatttgccgttatcaaaatacatgatgtagtgctgtctgctctcgcccacgtcgatcatgtgcttgtaatcgatcttgatgcggttgccgtttttcatgttgatgacgctgttcgtcatgaaaataagcgtcgtttccgtcaagtgcatcacggcaggattgttgttgcgaattttagaaagccagcgtgtgcagcgaatgacaataatcagcgtaatcgccacatacatgataagcagcgataaaatgaaattgcccacgtaaaaatgccccgcgttgaacgcaaagaggaacgagaacacaagcggcacgatgataaacgccgggatgagccacttaaagcgcccaagcgtagagtaataaatgaatgccttgtagtcgtcctcgccgatctggctcgtcacgcggaattcttctttttccggcgctttcttttcttccgctttcttctccttgtccttcggcgtttcctttcccgtcagctcgcggatatagcggtcaatgtcctcatcggtctccacggctttttcaagcgcttcgtccgtttttctttcttctgccattatgcttcgttcctttccgtgttgtcctcaccgtttaaaagcgccaaaagctccgcttccgtcaatacggggatgcccagcgtctgcgccttcgtaagcttgctgccggcttcttcgcccgccacaacatagctcgtctttttcgagaccgagccgctcacctttccgcccgccttttcaatcagcgctgcggcctccgtgcgcttcaaattcggcagcgtacccgtcagcacaaacgtcttgccgaggaatttcgtgtccgtcgtgaccgcttccgccgtcatgttcacgcccgccgcttttagccggtcaatgagctctatcgccgagtgtcttctgaaaaatgcgtagacctcctgcgccataatgccgccaaagccgtctatcgccgcaatctgctcctcgtccgccgcaatcaaagcatccatatttccgaacgcgcccgcaagcagctttgccgccttcgcgccgatgtgcggaatgccgagcgcaaacagcagctttgataaatcgttttctttcgatttttggatcgccgcaacgaggttttccgcgctctttttgccgaagcgatcaagcgtttcaagctcctgtgccgtaatgtcgtataaatcagccggcgagtgcacctgaagcgctgcgctcagctgctccagcgccgccgggcccaatccgtcaatgtccatcgcgtcgcgcgacgcaaaatgaatgagattgcgcatcagctgtgccgggcactgcggattcgtgcagcgcgctgccgcttccccctccacacgcgtgataacttccccgcacgaggggcacgtttccggcaaacggtacggcacggtatcctccgggttcgagaccacggaaacgacctccgggatgatctcgcctgcctttcggataatgacgcgcgagccgatgcggatatccttttccgtgatgaaatcctggttgtgcagcgtcgcgcggctgaccgtcgtaccggctaagaacaccggctcaaacacgccggtcggcgtcaaaacacccgtgcgccctacagcaacttctatgtcaaggagcgtcgtctctttttcctccggcgggtacttgtacgcctccgcccagcgcgggaacttcgccgtgcttccgagtgcctcgcgctgagagaagctgtccacttttacaacagcgccgtcaatcgggtacgagaacgtgccgcgctcgttgccaatctcgcggattttctcgattaccgtctctatgtcgcccgtgcggcaataaagcggcgacaccgtaaagccaagctcgtgcaaacgcttcaatgcgtccgcgtgcgttgtgacggtctcaccctcgatgacctgaatgttaaaaacaaaaatatccagcgtgcgctgcgccgtaatcttcgggtctttctgtcgaagcgaccccgccgccgcgttgcgcgggtttttaaacggcttttcttccaaaagctcctgccgctcgcacagccgcaaaaagctttcgtccgacatatatacctcgccgcgcacctccaaaaacggcagcggctctttgagcgtcttcggtacggatttgatcgtaccgatattcaacgtcacgtcttcacccgtaatgccgtcgccgcgcgtagagccgcgcgtgtatacgccgttcacgtattccaacgccacggaaaggccgtcgaatttcggctctaccacatacaccgggtcgtccacaacggcgcgcacgcggcggtcaaagtcgcgcagctcgtcttcggaaaacgagtcgtgcaggctctccatcggcacggtgtgcgtcacttccgcaaacgtgttgtaccccgctgcgcccacgcggttcgtcggcgagtcctctgttttcagctccgggaacgccgcttccagattttccaagcggcggtacagcatgtcgtacgcatagtcgctgatttccggcgcgtcctctgtgtagtattttttattgtggtactcgatctgttcccgcagcgcgtcaatctgctgccgggcctgttcgtgcgtcataagttaaaactccgtgtcatttcaagatatttcgatacttgttagtatcttaccacaaagcgcgcaaaaatccaacggttattcacaattttttatcctgcgcgcaccacgccgtactgcggcacgtcgcccgcaagcaccgcttcatacacggggtatgctgccgtcaccgtcacaggctccgccccgtctcgctccgccgtgaacagcaccgcttcaatatgcagcaccgttcggtacgccgtgcggttgatgcccgcgcccgtcaagacgctttcaaaccgcaccgaaaccgcactttccaccgaaaaccgcacgggtatcttcatcccgcgcccgttcaaaagcatcagccccgttaaatttccgagcggcacaaacgcctttgccgtgccgttcaagcttttccgcaaagcatccgtcagctccgcttccagtacgccgagcgcatatgtagaaagcgccgtctctgccccgtccttttcgcagacggtctgcggcagatactccggcaccgttttcgcgatgcacccttgcgcgtgcgccgtcagtgctgccgtgcgcagctccgctttcatcgcgggcagtcgcagctcggcaaacacaaaagcgaaaacgagcagcaaaaacgccaacacgcgccgtttacgtccgcgtttataccgtcttcggcgataccggtacataaatcatcagtcctttccgatacgccagtatacgccgaaaaggactgatcgtgcctgtctcatattttgtctgcctttaaaagctttttcgcttcctgcatcacgtgcgccgcaggcagaccgaaaatgttgttgtagtcgccctcaatactctctacaaacagcgccgccgggccctgaatgccgtagccgccggccttgcccatcggctcgccgctctgcacgtaagccgcgatttcgctttctgtcaggggatagaactttaccttcgtctcctgactgaacgaaacgcgctcgccgtgatacgccatgcacacgccggtaaacaccgtgtgcacatgcccggaaagcaggtgcatgaaacggtttgcatccgttaagtctttcggtttgccgagaatttcgccgtcgatgtacaccaccgtgtccgccgcgattacaagatcgtcactttcgcacttcggcaaaaccgcttccagcttgcggcgggaaagctcctttacaagcgcgtctggcgccttcggcccgttcgattcatcggcattcgagacgatcactgtaaactcgatgcccgcgcgttccagaatctccttgcggttcacggaggacgaggctaaaacgaagcgtgccatcagccgttgtagccgttcgggttctgcgtctgccagcgccaggagtccgcacacatgtcgtccagcgtcttctgcgccttccagccgagctcctcatacgccttcgtgcagtctgcgtagcactccggaatgtcgcccgcgcggcgcggcttgatctcatacggaatcttgtggccgacgcacttttcaaacgcgtgcacaatgtcaagcacagagtaacccacgccggtaccgaggttgtagatcttcacgccgcagtgcggatcgtcgaatttcttgagcgccgccacatggccctctgcaaggtcgacgacatgaatgtaatcgcgcacgccggtgccgtccttcgtcgggtagtcgtcgccgaaaacgccgaggcagcgcagcttgcccaccgccacctgcgtgatgtacggcacaaggttgttcgggatgccgttcgggtcttcgccgatggtgccgctcttgtgcgcgcccaccgggttgaagtagcgcaggatgatcgggttaaaatccgggtttgcgtgcgcgtagtccttcaagatgcgctcaatcatcagctttgtcgtgccgtaggggttcgtcgtcgaaagcgggaaatcctcacggatcggcacggaagccgggttgccgtacaccgtcgccgaggagctgaacacaaagttgttcaccttaaactccgccatcaccttcaaaagactcaaagtcgaaatgaggttgttttcatagtaacgcaacggaatctgcacggattcgccgactgccttcaggcctgcaaaatggataacggcaaaaatctcgtcctccgcaaagatcttgcgcagcgcgtcctcgtcgcacacgtccgcttcaaagaacttcacttttttgccgctcaaattttcaattcggtctaccaccagtgccttgctgtttacaaggttatccacgatcgtcacatcgtagcccttttcaaggagagaaatgcaggtgtggctgccaatgtagcctgtgccgcccgtaaccaaaattcttttcataagaaaccgacctttctgtctttctgtctgtactgattatacacagtttccgctgctttgtacagtagcgcgcgtattttttttgatgcttatttattgcgattttgttgcttcttttgcaataggcgtacaaaaagcgggcatactgaaaaggaaagtcatgaaaaaggagtcgtttcccatgaaccgtaccgtccgcaaaaacagtctgttgttcctcgccggcagcggcctttatccccttttggaagtgctgtggcgcggctattcccacgcctccatggcacttgccggcggcgtttgtctgctgctcatcaacgccgtatgctgcgaaaaaatgaaaaaaagaagccttccggcgcgctgcgccataggctccctcatcataaccgttgtggaatttttattcggcctgctcgtaaaccgcgtgcttcatctgcatgtgtgggattactccgccctgccgctcaacatcatgggccagatctgtctgccgttttcgctcatctggttcgttttaacgatccccgcaagcgccctatgcaagctctgctgccgcctttccgccttcccggaagagacaaaatcagcctcggtcatcacagacccttgatatatttttggaacaccggcaaaatgccgatcttatccggcgcctgcaacggcatctgcgggaacgcgtcatgacccggcatgttgttcgcttcaataaagagcgggccgtccttcgtgattgctacgtcccagccgatgtagcccatctgcggcaccttatgtgccgcttcacggcaaatgtccatcaccttgtcccagtacggaatccggtagcccttgagcaagcaccccgagcgcgggtggcgctcatagacgatgcgctgcttgtcgcacgccgcgcacgcgattttgccggtctcgaggtcgatcggcgaatacatgccgccggcattgatgttatccaccggtcggtcgctgttgcccatgcggatgcacgcgtacaccacgttcgatacgccgtcggaaagcaccgtgtacacgcggatggtgttgacggatccgggattgatgcggttcatatccgggtgctgaatgacaacctcttcaatcacgtccgcgccctttttctttaagtcctcatacatggcgtcgagcgttgcgtagtcggcctttttcagcttttccacacccacgccgcaggaagcgtcgtccggcttgcagatgatctcgtctttgtcctgcataaagtccaaaaactgctcttttgtgcacttggaaaaatgcagccactcgcggtgcaaatattccgcaaacgtcgtgtaaaactcgcttttgttgtcaaaaatatggtaatacgcggggtcgttgaggctttttacaatggagttattgatgccgcgcgtcacatacgtcgcacgctgcttgtcactcaggtcataaaacgcgcataaaaggtaatccttgtagcccgcaccgtacttaaagccgcacttgatgatgtcaaaaaacagccaaatacggtttttaccgctcacctcatgcaccgttttcaccgtatcgaacagcgatttataatccatgtgcagaatgcagtgaaaaatatatttcagtcttcccataagccgccccttcttacagccccatcagctttttctgcttctctaaaatgcgtgcgcggcggcgctcggtctcctccacgtcgatggaaagcgcaccgtcatcggtaatcttcagcacgtcgccggcctttgcaccctgcggcagctcgctcgtttcaatggcgaaaaacgccttgtccttgtcttcgcagatcgcgtaaataccgtcaaatcggtcgatggtgatttgtttcatatcatctgttcctttccgtaataccttttatataacagcgggttatttcccgttttccgtgtaaattttcgtttcagcgctgtccgtcaaaatcgcaataccgccgttttcgtccgtgcggaaaatttcaatgccgtggtcggcgagccgtttcagcgtctcgtttcgcggcagcaaatttctgtcttcgcccgaggagattaccgcatactgcggctgcacagcttcaagcaatgcatcgcttgtcgccgaagcgctgccgtggtgcggcaccttcaaaacatccgcccgcagcgtgtcgccatacatatccagcagcagtctttccgctttctcctcaatatcaccgcagaatagcacggaaaatttcttgtagcaaagcttatacacaagcgaattctcattcgtgctctctaaatcttctgaaggcgcgagcacccgaaattccgcctcgccgtaagagaccgtctccccggcgcttaccgttcgcacggtttgatcttccggcagcccggtcagctccgtgtacatggaggtgaccacctcctctgcgggcacctcccacaaaatttgcgtcagcccgcccacgtggtcgctgtccgcgtgcgagatccacacggcgcgcagcttttgaatgtttcgctgttttaaaacgcgcagcacggttttcgcctgctccgctgtcgcgcagtccgaaagcactgcgccctccggcgtttcgattaagattgcatccgccttgcccacgtcgatgacataaaccgtcaaatcggcatcgggcaagctctgtgcaaacggcagcaggccgcatgcgcggcggagctccgtccacatcgcccgtccgggcggcgtgtaacagaacgccaaaagaagcaaaacaagtaccaaagcgcctgtgcgcacaagctttctgccgtcccgtgcaccgcgctttgtgttacgcatcaccgggggtatcctgcttttgcatgttcatttccagccactgcgcataggtgatgagtacttggcgcggcttcgagccctcgtgcgggcccacaatacccatctgctccatctcatcgatgagacggcccgcgcgggcgtagccgagacgcagtctgcgctgcaaaagcgacgtggaggcctggcccgcttcaacaacgcacttaatggcttcgttcatcatcgggtcaccgctgccctcatcgtcattgctgccgctgtcgctcgattttgagccctccacagcgctgcgctcaatctcctgcgcaatggagtcgtcgtaaataacgcttctcgaattcttcacgaaatccacgacggattcgatctcgctgtcgctgacaaagcagccctgaatacgcagcggcttctgtgcgccgaccggcgagaacagcatatcgccctgaccgagcagcttttccgcaccgccgctgtccaaaatggtgcgggagtcaatggcagaggacaccgcaaacgcgatacgactcgggatgttcgccttgatgaggcccgtcacaacgtccacggacgggcgctgcgttgcgaccacaaggtgcatgccggcggcacgcgccatctgcgccaagcggcagatcgcgtcttccacctcgttcggcgcggccatcatcaggtcggaaagctcgtcgatgatgatgacgatctgcggcattttgtgcatgggctgtccgttttcgtcctgataattgttcgcctgcgcgagggcgttgtagccctttaagtcgcgcacgttgttttcggcaaaaattttgtagcgcttcagcatttccgtaacggcccagttcagcgcaccggctgcctttcgcgggtcggtgacgaccggcaccaataggtgtggaatgccgttataaatgccgagctccacgaccttcgggtcaatcatcaaaaagcgcacatcgtccgggccggatttatacagcaggctcacgataagcgagttgatgcacacggatttaccggagccggtcgtaccggcaatgaggatatgcggcattttgctgaggtctgccaccgttacctgaccggcaatgtcgcggccaagcgccacggtcaagtggctttttgaggtcacaaagctgttcgattccacaagctcgcgcatgcgtacgatggtcttcaccttgttcggcacctcaatgccgacggccgccttgcccgggatcggcgcctcaatgcgcacgcccgtcgcggcaaggttcattgcaaggtcatcggcgaggttcgtgatcttgctgattttcacaccggcggcaggctgcaattcatagcgcgtaacagccgggccgcggcaaatatcgagaattttggtctgcacaccgaagcttttcagtgtttccacaagcagcttgccgtttgtctggagctcttcggtctccacggcggcatctacttttttgccggaagcgagcatcgtaaccggtgggaagatatatgagctgtcttcctccttcggtgcagattgcgcaagctgggtctccatgcgttctgcttccaacttctttttcatgaattcttccgtcgccttctgcgcgtccgcggcagcttccgcgctgtgcgcgggcgtcaccggggacgaccccggcacaaggattgtcggtgtggccggctgtggcgcaggctgtgcatacgcactctgctgcacaggtgcaggctccggctttgccgtctgcataacgggcggcatgatcaccggcgcttccaccgtttcgcgttccaccggcacgtgggtctccggcgtttcagcgggctgcggcgcggggcgcacttccgcctgcaccggcggcgtataggtcggctgcacattttgcgcaggctgtgcttcacgctctaagccgggcacgcggaaatccggcacacggcgattttcgtcgatcaatgcgttgatctgtgcagagctttcggtgtaatcgtgcagcactacggggtcgttatccggctccgtgcggcgcacaccgaaaagctgctccaaatacacacgcggcgtctttcctttgtttttcgattccattttaccatcctccgggacagagcgcaccggatgctgcggcaaaaccgtttcaaacggcgattcctccgcattaccgcgctcctcttccagaatgcggcgctcttccttgcgctgccgcgcgacgtcgcgaatgacgaccgccggctttgcaatttttttaaaaaagctcgcgagcgacgtgcccgtaaagatgagcacggagacgaacagcagcacgcccgtgatgatgcgtgcgccaagcacttccgcgcacttgacgagcagctcgccgacaaggccgccgacaagaccggccccgccctgctctacgccatgcatatataagatgccgaccagcttaaaaaaactcttttccttcgggaaaaagctgccaaacacatgccccgccgtgcaaaacagcacgacaatcacgaccatgagcgccaagcgcccgccgcgcagcatggtggtctgctccatcgttttgctgacggcgatataccccatcagcaccgcaagcagaatagcccagccgccgaacacgccgcgcagcacgttgtgcaccataagccacacgctgcctcccggaatgagtacaaagcacgccgttaaaatagccgcaccgaaccagaggatagcttctgtctggttgcgctggcgcagctgctctacgctggacgcgctctgttttgaagacgtgctcttcccttttgcggaagacgcacgcgattttgtattggacttagaacccgagctccgggtgtttttggcagccgatgacttcgcaccgcttcttgctttggaagcactgccctttgctgtactttgttttttacccgccaaaataaacctccggattataaatcaccggatcaaagcggcatgccggtgaaaagatttgtgcccgtgaccgcttcgataacggaaacgatgagcgttataacgccgagcaccagcgtataataagcgaaaacctgtaatttgttcgtggtgacaatccacttgagcagcttgatggcgaggaagccgacaacagccgccgtaacaacgcctgcaatcatcgcaccgacgccaatgtcgaccggctgaccgattgcatctttaatggtaagcacagctgccgccaaaatggacgggatgccgagcacgaaggaataatcgagcgctgcctgctgattgatgccgcgcagaagacctgccgccatggtggagccggaacgggaaaggcccgggaacaccgccgccgcgcactgcgtgacaccgacgcaaatggcgtctgccgtgtggaactttgtgcggccgcgaatctcgccgactttaccatccttacgcgtaaagtgatgtacctttgcacccttggaagcacggataccgaggaacagcagggcacttgtcatgaggagcgcaaagccctcgatccaaatcgtcgaatccgaagcccacagctccgaaatatcttttaacttcatgcccgtgcccggaaccggcaggaacaaaaggaacagcgggataaggccgatcatgagcatcatcaaaagtctgcggtcatgatccatttctttccacttgaatttgccgcggaatacgtctgcaacgagcgaaataaacgccttaatgagccgccagatgagcttataatagacggcacatacggcgatgagcgtgccgaggtgcaaaagaatatcaaacagcaagctgtctacctttacacccatgatgtgctgtgcaagcgacaagtgaccgctgcttgagacgggcagaaactctgttgcgccctgtacaataccttgaatgattgcttcaaaaatagacattatgtaatctccttttctgcggataatttggctttgttcggttttatcggtataattatacgataaataaaaagttatgtaaacggcaaatgccgtttttagagtgatttcttgccttttctgggctttgcacgctgcttattcttctctgcggcaatcattttgtcgaggcaatccatggcatcgtgcaggctgccgagcgtatcaataagcccctctgccacggcttcatcgccgtccagcaccgtccccacgtccatgacgagctcctgcgtattcatggcgagctgcataaagcgctcataggaaatgccggaatttgccgtgacgaaattcgtaatgcggtcctgcatgcgctggaaatactccagcgtctgcggcacgccaagcattaggccgctcatgcgcaccgggtgaatggtcatggatgccgagggcgcgatgaacgagtgctttgccgccactgcaagcggcacgccgatggaatgtccgccgccgagaacgagtgacaccgtgggtttgcgcatgccggcgacaagctctgcaatggcaagaccggcctccacgtcgccgccgaccgtgtttaaaatcatgagcagaccgtcgatgttcgggtcctcctccacggagacgatctgcgggatcacgtgctcgtacttcgtcgttttgttctgcgatggtgcgacgtaatgcccttcaatctgtccgatgacggtgaggcactggatggtgtgctttcggtttttggtaacgaccgcgccgccctcgcggatctgcttctgacggtcggaaaggtcttcgttttcttcttcggcttcgtccgtttcctgcatggaaaaagacgagcgtttctttgtgcttttcatgccgcagcgctccttttgaattaagatgcgcttagttttcacagaaaatgcggaatcatacgcggcacaaactttcacgtatatcagtatagcacgcttttacgcatcctgcaagggcaaagcgcaaacatgtccgccgatgtcctgtaaatacatagtatgcacgttttgcagggtttaactgtatttcctgcaatttcatgcagtttattcacaatttacgattgacttttctcgcgaaatatccgataatgatagaaacagcgtcacattctccccccgtgacacagagcttcgcggtacagccgcagaaaggtaaggctttgaaatgtccgattttacaaagatccccatgaaaacgccgcttgtggaaatggacggcgacgagatgacccgcatcatctggaaaatgatcaaagatattttgctgaccccctatgttgacctgaaaacggagtattatgaccttggtctggagcaccgcgaggcgacgaaagatcaggttacgattgattccgccgaggcaacgaaaaaatacggtgtggctgtaaagtgtgcgaccattacgccaaacgccgcgcgtgtgaaggagtacaacctcacagagatgtggaaatctccgaacggtaccatccgtgccattttggacggcacggtgttccgcacgccgattttgctgaagggcatcacgccgtacattccgacgtggacaaagccgattaccattgcgcgtcacgcgtacggcgatctgtataagaacgtcgagatgcgcgtgccggaaaatgcaaaggctgagcttgttgtgacaaaagcggacggcactgaggagcgcgtgaccatccacgaattcaaaacgccgggtgtgattcaaggtttacataatattgataagagcattgagagctttgcacgctcctgctttaattacgcgctgagcatgaagcaggacctgtggtttgcggcaaaagacacgatttcgaagacctacgaccaccgctttaaggatattttccaggaaatttacgacgcggaatataaagagaagtttgaaaaagtcggcattgaatacttctacacgctgatcgacgacgccattgcgcgcgtgattcgcagtgaaggcggctacatttgggcctgcaaaaactacgacggcgacgtgatgagcgacatgatcgcgacggcgtacggcagtcttgccatgatgacctccgtgctcgtctccccggacggcgtttacgagtatgaagccgcgcacggcacggtacagcgccactactacaaatatttgaagggcgaaacaacctccacaaactccgtcgcaacattgtttgcgtggacgggcgcgctgcgtaagcgcggcgcgctggacgacctgccggagctgagcgcctttgcggacaagcttgaaaaggcaactttgcagacgattgaagaggacggcatcatgaccggcgaccttgcggcgatgtctaccctgccgaatgcaaagaaagtggacaccgagggcttcctcctcgcgatccgcgatcgtttggagcaacttctgtaacccgacatggatttgaaaagcgtgggcggccaccctcctttttagggtctggccgcccgtttttcttttcttatttataaaaaacacttgcacaggtctttatgatgtgctaaaattttgtcaaacgaggtgatgatatgcagaagaaaccgtatatttccatgccggtcattcggcgtctgccgcgctactaccgctttttgcggcacttggacaagcgcggagtgacgcgtatttcctctaaggagctttccgaaaaaatgggtttcacggcttcgcaggtgcgccaggatttcaactgcttcggcggctacggccagcagggctacggctacggcgtgcaccaactttgcgaggagattggctctattttgggtgtggaccgtgcacacaagtgcattttaatcggtgcaggcaatttgggcaaggccattgcgacgcacatttcttataatttcgcggggtttgatctcatcggtatttttgacaacagcgaacaggtcgtgggccagcagattgccgacctacgcgtactccccgctgcgggcatccgccgcttctgctcggaaaacgcgcccttgatggcgattttgtgcgtgccggacagtgccgtgaaatcggtcgtggagctgctttatgacatcggcatcaagagctactggaatttcagccactacgatattgccctgcgctatccggacacgatcgtggaaaacgtgcatctgaacgacagcatgatgacgctgtgctaccgcgtgaccgaaaacgaaaaaagttcttaaaagtcaaaaaatagctgttgacaattcagctgcatcatgctataataattgagccgtcaaacgagacggcaaaaagaatatgcaggtatggcggaattggcagacgcgtatggttcaggtccatatgaatgcaagttcatgcaggttcaagtcctgttacctgcaccaaaaagaccattgtcaaatgacaatggtcttttttcaacgaaattcgccttacggcgagtaaaataacaaccttcggttatcgtgaaatttcttcgcagtgagctgtgctgcgcgcgttaagagcgaagttcctttcactttctgtatacgcggaaaacttcacaaatacggcagcactcatttcatattctgcaaagcgaaatatgtcactaaccccaccgccataaagacaaaatcttatctttgcgggcggcggggttttatcatctctcccccatcaccgcagccgtaacggctttagctaagcggttgacggcttcgggaatgcgggcgtcgggaacctcggagtagctgataacgaatgcggtctgcgggtttacgggcgctgtatggtaatacgccgaaagtccggtgacgcgcacgccgttttccgccgcgcggcgggtgatcttttcggcgggcacaggtccgcagacacgcagaagaaaatgcaggccggcgtcttcggcatcgatttttgcaagctttaacaaaccgcagcgcttcatctcttttaagatgaggtcctttttttgcttataacggatgcgcatgcggttgatgtgcttttcaaaatagccctcggaaatgaattttgcgagcgtgtactgctctaggttcgagaccgtgcacgcgtagaacccaagatttttgtaaaatgcttcggcgagcgctgtgggcagtaccatgtagctgatgcggatggtgctggcaaggctttttgaaaacgtattcatgtaaatgacgcggtcggcggaatcgatgctttgcagcgccgggataggcttgccggtaaggcggaactcggaatcgtaatcgtcctcgatgatgtaacggttttcgctctgcgcagcccaatcgagaagcgtgtaacgccgtgcgatgggcgtgacgatgcccgtcgggaagtggtgcgacggcgaaatgtgcagaatatccgcgccgcttttttcgagcgctttggggtctatcccctctttatccatcggcgtgaaacggtactgcacaccgtagctctcgtacacctgcgcaattttgcggtagccgggatcttcgagcgcgtagaccttatcgaaccccaaaagttggatgagaagcccgtagaggtactccgttccggcgccgacgacgatgcagttcgggtcggcatcgatgccgcgaaactccctaaggtgctcggcgatggcgcaccttagctcgaatacgccgccgcatggggcgtttaccataagctcggcgcttttttccgagatgatctcgcgcatgagcttcgcccatgtggcaaacggaaaattctgcgggtcggtgcggctgctggaaaaatccgcaaaatatttcggcggtacgggcatttgtgtccggggactctcttttttctgcggcgcggtgcttttttccagattggcggcgaagaagccttttttcggcaaggcgtagacgtacccctccgagacaagctgcgcataggcgttttcgactgtgatgacgctgacgccgaggttttccgcaaagctgcgcttagagggcaattttgtgccgggcgtgatcttgcccgtcagaatgtcctcacggatgcacttatacaggtacatataaaggctttcggagccgatttttgagaaagaataggtgagcatgtaggttctccgtgatctgtcgcgttttaatttagtatagcggactcttgcacaaatgtcaaagccatggtatgatgaccttgaaacggaggggattgcatgccgaacgaagcgaagcttttatatgacgcgctcctgtatgagaacgggcacctgcgccgcacacagcacattttaaaggtatacggtcttgcgaaaatgctgggtgagttggaaaatcttcccacccacgagcaggaaaatctgcgcgcggcggcgattttgcacgatatcgcgatcaaattttgcaaggaaaagtacgatgacggctgccccgcgaatcagcgcaaggaagcacctgcgttggcgcgaaaatttctgacggcttgtggctacgcggaagaagatctgccacgcatcaccaagatgatcgttctgcatcactgctacgacaagatcgatggcaaggatctgcagcttctcgttgaagccgacctcattgcgggctgcacggaagaagatgatccttctgcccacgcaaaagccgtgcggcgactgtttaaatcctcttcgggtctcgccctgctcgacacgttcataaaagaataacgaataatttgacccgccgaggtgtatatttcccggcgggtcttgctttatggttcgttcggtgcggcgcacggcgaccagtttaggtctgcgtttgccacgcggcaatagcgtgtagtttgtgcatagccgccgtctcctgcgcagtcactgccgtctttgtttacagccgagacccaatagtgttcgccgtcaaagtaccattcgcgcagtgtaaggtcttcgttttgtagcgggactgcacccttttcccagccgttttgggtggaaaagcggtaggcaatgtcgccgaacgcaaacagaaagccgtctgcttttgcggtatagctcggcacaaaattggctgtgctttgctcgaaatcggcgacttcagtgcaggtctcgccgtcaattttcgcgagtacgctgtaaatcggtttttcgcctgcgtcttcaccgaaatcgtatccgtaaaaatacaggtagtcgccctgcacagcgaagctgatgttcgtgttcttccagtttgcggtatcaggattttgcaagcacgcagacagatcggcaatatttagaagcgtaccgctttcctcataggtatgaaccgacaactgcgatgggttttccgcggactgcatgagcacagaaaacccgtgcgcgtttgcgtctgcagcaagaccgagcactttacatgcgccattttgcgcattgtaaacggtgttcacctcggcagttttggggtcgagaagcaaaatttgcccgcctttttggaggagaaaatgctctccgtaggcgcagagcgtcaagccaataccagtcgttgtatcggttacgcagtagttttcggtgccgattcgttgcatggttttcacattcaaatcgaaatcatagagcgcgagttcggcgtctttatcgggcatattccaccagttgccaagcggaatcatgcggtaaacgtggctaccgacaaccgcttctgcgctgtcggtcggctcatagtacatgcggttcaacgtgccaagcagcgtttcttcaccgttttttaaatccttgcaatagtacgaaacacgcgtcacgtcgcccttttcatttcgcgcacggcggtcaaacaggagcatgtcaccgacaggcgtaatgccgcacgaggacgaaaattgccctgtttcatgccccgcggcggtatagagaatcgtctgcgtttcggcttccgtcaccggctttggcggctgcgcacagccggaaagaagcaggcaaagcgaaagcgtgagcgcagcaaaagccttgcgctctttatttcccctgcccataatacgcgtttgcgccgtgcttgcgcaggtagtgcttatcaagaagctcctgctgcatgggcgggattgtggggtcaagcacgaggttgtgccatgccatgaacgcgagctcctcgaggacgacggcgttatgcacggcgttcatggggtctgtaccccatgtgaacgggccatggctgtggacgagcacggcggggatgtcgtccggggacttatccttaaacgtctcgatgatgacggtgccggtctccttttcataagcgccgccgatctcctcaggcgtcattttgcgcgtgcagggaatttcgccgtagaaataatcgccgtgtgtggtgccgagcgccgggatgccgcggccggactggctgaacacggtcgcccagcggctatgcgtgtggacaacgccgccgatgttcgggaatgccttgtagagctcaacatgtgtgggcgtatcggacgatggattaaggtcgccctccacctttttgcctgtgttcacatcgacgagcaccatgtcctcggggcgcagaaggtcgtactccacgccgctcggcttaatggccatgataccgctttcgcggtcgatgccgctgacgttaccccacgtgaacgtgatgagcttgtatttcggcagcagcatatttgccttgtagacttcttctttcagtttttccagcatgatgttctcctcctgtatccggtcaaatgagtttataaagctttgcgccgtgcggctctattttagcggaaagcgtttttgtgaatgcggtcttctccccactccagatctcctctgcgtgcgttttatcggtgaattccgacagctcggcgctgacaacggcgcggttttccgtgaggttgaaaagtgcgatatacggcgtgctgcctacgaaattgagccacgcggcttttgtttcgtcgcggaaaagctgcaaaggcgtggtgccgttttggttgaggtttaaaagctcgtcatttgcgagcaggctcagcgtgaacgcgtcattatcgcgcatttcgccgcccatgatgagcggcgagcggaaaatgccccacagcgtcatcatggtgatctgctcggcgtgtgtcaggttcgtattgtgccctatgccgtccgccgcgatggtgatatgcccgagcggcagcatatcgcagtccgggaactgaccgggctttacgtgcgcctgccagcgctcgcaccgccagaacatttctttgagggagtcccaattatcccagaaatcgtccgtgatgcgccacatgttcgcgtttttcgcaagatgccatgcttcttccagtacagccggaccgggcgaaaggctgagcaccatatcgcgcccgcagcggtcaatggcgcggcggatcatctcgatctcgcggcgcgcggaatacggctcgagcggagtgatcttcacgttgcagatgtcatcgaccttgacgtaatcgacgccccatgaagcgtagagctcaaagatagcgtcgtagtacgcttgtgcgccgtcacgatcagcgtcaacgccgtacatatcggtgttccacgcgcagatggagtttgcgtgagcgatgtcgcggcaagtgacgttcgtgtcctttacaggcagggcgcgatgcacggcgagacgcggtacgccgcgcatgatgtggatgccgaatttcagaccgagtgcgtgaatctggtcggcgatgggcttaaagcccgcgccgtttgcagcggaagggaaacggttttccgccgggatgaggcggccgaatccgtccatgcacagctctgcgaaacggttatactcccagtggcgctgcccggcctccggctgctcgtaccactgaatgtcgcacacgacatactgccaaccgtgcgcttttaagtgctctgccatataacgcgcattgcccaaaagctgtacttcattgacggcggggccgtagcaatcccagctgttccagccaagcggcggctttaaagcgacgcgatcttttttgtaatgcatagtgtatcctccgtaggaaataagctcagtttcattatagcaacttgtctgcacaagtcaagagcaaaaaagagactgcgcaggttttgcacagtcccctttgccttcgtttgaattactttttaagcagctttttgaggcgctccatggcttcctgtgtcttttccagcgtaccgaacgcggtaaggcggaagaagccttcgccgtttttgccgaagccgctgcccggcgtgccgacgacctcggcttcgttcaagagataatcgaagaactcccaggaggtcatgccgtccggcaccttatgccagatgtacggggagttttcgccgccggtgaaccacacgcccatctccttgaacgcatcgaccatgaccttggcgttcgcacggtagtagttgatgacgtccttcacctgctgctggccttcgtccgtgaagacggcctcggcggcgcgctgggtgatgtagttgacgccgttgaactttgtggcctgacggcgcgcccacagcgtattgaccttggtgccgtccgaaacaagctcatcgcagataacggtatagccgcagcgcacaccggtgaagcctgcggtcttcgagaacgagcagaactcgatggcgcactttttcgcgccctcaatctcgaaaatgctgtgcgggagatcgtcatgcgtgatgaacgactcatatgcggcatcaaacaggatgaccgcgttgtttttgagcgcgtaatcgacccacgctttgagctgtgctctgttatacacggcgccggtggggttattcggcgagcagagatagataatgtcggccttgacgttttcatccggcataccgaggaagccgttctgctcgtttgcgtcgaggtagatcacctttctgccggacatgacgttcgtatcgacatacacgggatagaccgggtccgggatgaggacggtgttatcgtctgcgaagatatcgacgatattgccgacgtcgctctttgcgccgtcgccgacgaaaatttcgctgagctttaatgccacgccgcgctttgcgtaatagccctgaatggcttcacgcaggaaatcatagccctgatccggcgaatagccgtggaatgtctccttgtgcgccatttcatccgttgctttgtgcatggcttcgatgacggccggaacgagcggctgggtaacatcgccgatgcccatgcggatgatgtggttatccggatgcgcctccgtataggcggcgactttctttgcgatggtcagaaacaaatagctttcctgaaggtttgcgtagttttggttgagtttcatgccggtttcttcccttctttttatacttggaccttttttattttcattaccgtctcttatgcgttcttttccctcttattgagtgatgcgccgacaaagccgaggaataacggatgcgccttattcgggcgggacttaaattccgggtggaactgcacgccgatgcagaagtcgttctgcggcacttccacggtctcgacgatcctgccgtccggcgaggtgccgctgatgaccatgcctgcttttgtgagtgtctctctgtaatcgttattgaactcatagcggtggcggtggcgttcatcaatatgggaaacgccatagcagcgcgccatttgcgtgccctccgcgatctcgcacgggtagctgccgaggcgcagtgtgccgcccatattgatggtgctggactggtccggcatgaaatcgataaccttattgaggccgtactcgtcgaattcgccggagtttgcatctgcgatgccgcacacgtggcgggcatactcgatgacggcaatctgcataccgaggcaaatgccgaggtacgggacgttgctctctcttgcgtactgtgcggcataaatcataccctcgataccgcggttgccgaagccgcccggcacaaggatgccatcacagcccttgagcatttcggcagcgttttcctgcgtgatgagctcggaatcgatccaattgatctcgacctttgtgccgtgctcatagccggcatggttgagtgcttcgacgacggaaaggtatgcgtcatgcagtttgatatatttgccgacaaggccaatggtgacggtctttttgcggctgcggatcttctctaccatgcggctccactcggccatatccggctcttttgtcttgaggttcagctcgcggcagacaacgctggagaaattgtttttctccagcataatcggcgcttcgtacagcaccgggatcgtcatgttttcaataacacagtccggctttacgttgcagaacagggcaatcttgtggaaaatgctcggatcgatcggctcatcgcagcgcaggacaatgatgtccggggagatgcccataccctgcatttcttttacagagtgctgggtcggtttcgacttatgctcgccggagcttttgaggtacggcacaagcgtgacatgaatgaaaagggagttttccttaccgacctcgagcgaaacctgacgaatggcttcgagaaacggctggctttcgatatcgcctgccgtgccgccgatctcggtgatgacgacgtctgcattcgtcttgtggccgacgctgtaaatgaagctcttgatctcgtccgtgatgtgcggaatgacctgaatggtctcgccaaggtactcgccgcggcgttccttattgaggacgttccagtagaccttgccggtcgtgaggttggagaatttattcaggtcttcgtcgatgaagcgctcgtagtggccgaggtcaaggtcggtctctgcgccgtcctcggtcacgtaaacttcgccgtgctggtacgggctcatggtgcccgggtcaacgttgatgtacgggtcaagcttctgtgcggcgacctttaaccctctcgcttttaaaagacggccgagcgatgccgccgtgatgcccttaccgaggccggaaaccacgccgccggttacgaaaatgtactttgtcatagaacttacccctttcttttttacagtgaaacttttatatttttctttgactgagaaacctattatttctccaataccctatttcattttatcaaagccgttttcggcttttttacagttaaatttctacgatgccggtaaaaaccgtgtcggcgctgccggtcatctgcacgccgtcatcggtataattgatgacaaggtcgccgccgcgcagcttgacggtaatatcttcgccctttttgcagtagccgttgagacacgccgcgacggcagacgcacacgcgccggtgccgcacgccatggtttcaccgctgccgcgctcccacacgcgcatttttaaggtgtggttatccagcacctcgatgaactccgtattgatgcgctccgggaacttctcaaagtgctcaaaatgcgggccgatcttctcgaggtcgatcgtatcgggatctttgccgaaaatgacgcagtgcgggttgcccatggaaacgcaggtgacttcgtattctttgtcaaggacggtgatcttctctttgacggcagtatcacccgggaaatcgaccgggatcttcgcgggcacgagctccgctttgcccatatcgaccgtgacagtggtaacttcgccgttttcgacatgcacgcggcagattttgatgccgctttttgtctcgatatgcaaaacgtctttcttcgcgatgccgctgtcgtagacatactttgcaacgcagcggatgccgttgccgcacatcatgccctcactgccgtcgaggttatacatgcgcattctcgcgtcggctacatcggacggacaaatgtagatgacgccgtcgccgccgatgccggtgtggcggtcggaaagatagattgcgagctcggcgtagttttgaatatcattttggaagcagtcaatatacacgtaatcatttgcacagccgtgcattttggtaaacgtgatcttctgctttgccccggtgcccggcacgcgcacatagtggtcgatgcccgagctgttttccgcttttttcaagtacttgttcatggaatttcaccgctttctcttgaatttttaccttttatcttcttcaaatttttagaaaaagattctgattttattcttaaaatgtttttcggcgctccgcaaaaatgcggaacgccgaactatttaacatcaattagacttctacgacaccgtcgaagaccttctctgcgccgccggtcatgagcactttctcatcggtgtagcgcacggtgaggtcgccgccctttaagatgacgcggatgtcctcgcctttttcgcacttgccgttgagcgttgccgcgacaacagccgcgcaagcacctgtaccgcaggccatcgtttcgccgctgccgcgctcccaaacgcgtaccttaagggtgcgctcgtccacgacctcgatgaactcgacgttgacgcgctccgggaagagcgggttatactcgaacttcgggcccatggcattgagatccagcttatcaatggacggtgcgaacaccgcacagtgcgggttgcccatggatgcgcaggtgatgtaatactcgtgaccgtcgatgatgacaggcttgttgacgaccatgtcgccttcgagctttacgggcacctgctccgggcgaagcgctgccgcgcccatatcgaccgtaatcttgtacgccttgccgttcatcgtcatgatgctgcaagacttgatgccgctctttgtctcgatattgatgacaggctttttcacgatgccgttgtcgaagaggtactttgcgacgcagcggatgccgttgccgcacatgagaccctcgctgccgtcgcggttgaacatacgcatctgagcgtctgccacatcggacgggcagatgaggatgacaccgtcgccgccgacgccgttgtggcggtcggacaggtagatggagaggaactccggagaggaaacttcgttttcgaagcagttgatataaatgtagtcgttgctgcacgctgacatcttggtgaacggcagcttgaccttttcttttttgaggttgttgatgtccacaatctccgtgttgtacggggtgtagcggctcatcaggctgtccgcgagggcgtttgcggtatcgatggccgtgaggcacgggatgccgagcagcgccgcttttctgcggatcttaacgctgtcgcgtgcggggtttctgccctttgcggaggtggagatgatgtacgccagcttaccgctttcaagcagcgtaatggtgttgaccgggctttcgtgaatcttatcgacaatcttcacggtgaggccgagctttgcaagcacgcttgcggtgcccgtcgtggcgtaaagcgggaagcccattttgtcgaatttcttcgcgatctcgccgatctctttcttatcgccgtcgcggacggtgatgaacacgccgccctttttgttcatcttgctgccggaggcgatgaggcccttatagagcgcctcctcaaggttgttgccgatgccgagcacttcgccagtggatttcatttccgggccaagctgggtatcgacatccgtaagcttctcgaaggagaagaccggcaccttgacggccgtatacggcgaagtcggatagaggcccgtgccgtagccgaggtcggtgagcttcatgccgaggctgacctttgtagcgaggtcgcacataggcacgcccgtgaccttgctgaggtacggaaccgttctcgatgcacgcgggttgacctcgatgacgtagatttcgcggttcatgatgatgtactgcaggttgatgaggccgatggccttgagctccgtgcagagcatttcggtcgtcttgacaatcttcgcgctgagctcgtcgtcgatgtcctttgccgggtagaccgcgatgctgtcgccggagtggataccggtgcgctctacgtgctccatgatgcccgggatgaggatgttctcgccgtcgcagatggcgtcgacttcaatctcggtgccactgaggtacttatcgatgagcaccgggttatcctgcttctggcgcaggataatcgccatgtattcgttgatgtcttcatcgccgtatgcaatgatcatgttctgaccgccgagcacgtaggacggacgcatgagcaccggatagccgaggtcgtgtgcggctgcgagggcttcctccgtcgtcataacggtgtgacccttcgggcgcttgatgttgcagcgttcgagcagttcttcaaagcgctctctgtcctctgcggcatcgatgctgtcggcgcttgtgccgatgatcggcacgttgtttttcgcaagcgtctttgtaagcttgatggccgtctggccgccgaacgcgacgacaacgcccttcggcttttcgatgttgatgatattcataacgtcttcggcgcacagcggctcaaagtagagtcggtctgcagtgtcgaagtctgtggaaacggtttccgggttgttgttgacgatgacgacttcatagccgaggcgctggagagactccacgcaatggacgctggcatagtcgaactcgataccctgaccgatacggatcgggccggaaccgaaaaccatgacggtctccttgccgcttttgccgatgaactccatcgcttcgttttcaccgccctgctccggcgtatcgtaggtgccgtagaaatacggtgtggtcgcagcgaactcgcctgcacaggtatcgaccattttgaaggtcgcttcgtgacggaaggtcggctttgtgccgcaaatacgcgtgagggcttcgtccgtgtagccgagtttcttgccgcgcgtatactgtgcgtgcgtgagcggctgatccttaatctcgcgctcatacgcgagcaggttattgagcttttcgaggaaccacatgtcgatcatcgtgaagtcgtggatctctttggtggtgacgccgcgcttcatgagctcgtagatggcgaacaggcgctcgtccgtcgcgtcttttaaaatctgccacagggcactgtcctcgtagtttgcgaacttcggcatgttgagcgtatcgagcgagatttctgcaccgcgcacagccttcatgagggccatttcaaacgtatcggcgatggacatgacctcgccggtcgccttcatctgcgtgccgaggttgcgctttgcgtagacgaatttatcgaacggccacttcgggaacttgaccgccacatagtcgagcgcgggctcaaatgctgcgtaggtcttgccggtgacggcgttgacgatctcatcgagtgtatagccgatggcaatcttcgtcgcgacctttgcaatcggatagccggtcgccttagatgccagtgcggaggaacgggacacacgcgggttgacctcaatgacggcgtactcaaaggacgtcgggtgcagcgcgaactggcagttgcagccgccctctacgccgagcgcgtcgatgatgttgatggccgcagtgcggagcatctgatattctttatcggaaagcgtgaccgccggggcgatgacgatgctgtcgccggtgtggacgccgaccgggtcgaagttttccatggagcagaccgtgatgacgttgcccttgctgtcgcgaataacctcgaactcgatctccttccagcccgcaatgctcttttcaacgaggatctgggtgatcggcgagagcgcaaggccgtttgccgcgacctccatgagctcttcgcggttatcgacgataccgccgccggtgccgccgagcgtgaacgccgggcggatgataacggggtacgtgatctcttccgcaaactccagtgcgtcctctaccgtggtgacaaccttggacgggatgcacggctgaccgatgctttccatcgtatccttgaacatctgacggtcttccgccttatcgatggtctccggggaagcgccgagcaggcgtacgttgtgttccttcaaaaagccttcctttgcaagctgcatggaaagcgtgaggccggtctggccgccgaaaccggagaggatgctgtccggcttttctttttcgatgatgcgcttgatggtgggcagcgtaagcggctcgatgtaaatgtggtccgccatggcgttatccgtcatgatggtcgccgggttggagttgacgagcacgatctcgatgccatccgctttcagagcacggcacgcctgagtgccggcgtagtcaaattccgccgcctgaccgatgacgatcgggccggagccgatgacgagaacctttttaatgtctttattcaatggcatagctgtaaacaatcctttctatactgctctgggtactgtttattttcccatcatctcaaagaatttatcaaagaggaacgcggtatcgcgcgggccgccgcaggcttccgggtggaactgcacggaaaaagcggggatttttttatagcgcacgccctcgcacgttctgtcgtttacgttgttgaaatattcgtcggcaatctcggggtcgattgtggaggacacgaccgcgtagccatggttctggctggagatgtagacgcggccggtctcgaggttctgcaccggctggtttgcgccgcggtgaccgtacttgagcttttcggtcttaaagccgtttgcaagcgccagcagctggtgaccgaggcagatgccgaagagcggtttgcccatgttcataatcttcttgaggttttcaatgacctcgatgttatccgccgggtcgccggggccgtttgaaagcatcacgccgtcaatgttgagagcctttaactcgtctgccgtcgtgttgtacgggcatacaatgacctctgccccgcgcttttcgagctcgcggcggatgttctccttgtagccgtaatccatgagcgccacggtgcatgttttctccgggttctcacggcgcgtcatctcggtgacggaggtgctttccaccgcgtttgtcacgcggtagctgtgaatcttatccatatcgacatgcgtaagctctgttgtgatcataccgttcatgacgccgctttcgcggatgacctttgtgagggcacgtgtatcaatgccgcaaaggccgatgacgcctctttctttaaaaaaggtgtcaagatcaccctccgagcggaaattggagggcgactgacaccattcttttacgatataaccacagggaccgatgatctttccctcaaaatcggaggggatcacgccgtaattgccgatgagcggaaatgtctggacgacaatctgcccgaaatagctcttatcggtgagcgtttcgagataacctgtcatgccagtcgtgaaaacgacctcagccgttacttcgcccgccgcgccgaaggattcgccgcagaagacctttccgttttcgagtaccaaatatgctttgttgcccataacgtacgttcctctttccctgaaataattactcttttctgctgtatgcaatctatgtcaaagctgcggtgcagccctgtacgcattcatttacgtataggttttcaggatattttccgcaacatcctttttcgatgtgcgcatatccatcgcctgtttttcaatatagcggtgcgcctgctgctcgctcatgcgcaggtattccacaaggatacactttgcacgcgccacaatgcgcacttcttccattttggttctgagcttctgattttcccggtcaaaacgctgccagcggttctgcgtggcgatgagcaggtgaagcgcctgataaaacagcgggcgcgaaagcggcttttgcaccgtcaatatgccaaacggctccattttgtcgttcacctgatcgaaaagctccgcttttgcaatgaccatgacaccggaaacgaatttttctgtgatatactctgccagctcgtgcccgaattcatccgggagcggtgtgttgataaccacaaggtcgtagctgcgccgcaaaagcaaccgccgggcgtctccgccgctgagcgccgttgtcatgggcgcaaactcgcgcggggaaagcagctctgtgatatacgccgcacctttttgcgtgccggacacgatgaggacgctgtgctgaatgatcgcattcatgccctgtgcccccttgttttacacatctgcgggcccgttgccgaacgtgcggatatacgtctttacgaaatactccgggaacacgttgcggacaaagctgctctttgcgaaaatttgcagcgcttcttcggcagacttcggcagcttgccgcaggtctcgcgcgcaaggtcgggctttggcagcttcgtctttttgaggtagccgtcaagccccgcataaatgagcgcagcgtacgcaaggtacggattcgcagtggaatcgggtgagcgcacctctattgtgctgctgccttcctttttatacgcaaagcaccggcggctcttctccgaccaagagatgaactccggcgcaccgaacgcaccgaggcgtttataggaatccgccgtggggttcaaaatggcggtaatttctgcggcgtgctccagaatacctgcaaggaaatactcggaacagtcgcccatctgcatgcgcggcgttagcgtgatgtggaagccgttgccgtccttacccggaatggggttcggcgcaaacgacgccgtaaggccgtttctcgacgccatggtcttcacaacagacttatacgtaacgacatcgtctgcggaccgaatggcagagctgtgctgaaaatcgatgatgttctgccccgggccgccgctgtggtgcgagctttccggtgtgacccccatatcctcgagtgtcaggcagatctcgcggcgtacgtcctcgcccttatcctccggcgcggcatccataaagcccgcgttgtcaaaggggatagccgttgcattgccgttttcatcgttcttgaaaaggtagaattcgtttcttgccccaaattcaaatattataccatgaagttttgcaatgtcaaccgcttttttcaagatgccgcggcagtcgatgtcgaagccggtgccgtccgaacggcgaatgtcgcagaaaaagcgcacgacgcgcccgtgtgcgggccgccacggcagaagcgacatggtggaggtatccggcaccaaaaagagctcgctgtccgcctctttttcaaagcccatgatgcgcgaagcatcaatgggaatgccgccctcgaacgcagaagccaaaaggctcggctgaatggcgatgatcttctgtctgccgaaaatatcgcagaacgccattttgatgaacttaacgtcgttatctgtgataaactctgtgacctcggactccgtatactgcatgccgaacccttcctttcttttttaaaagcgcgtttcaaacatacaaatacgcgtgaaatccggtgttgccgtctttcacgctgtacctgttcttcttttctgccgcattttgagatattctgccaaaatacagcgtatgctgaccgcttttgaatattataacacaagatcggtgtattttgcaataagacagaacgcacaatgtttatcgccaaaatacaccgtcgatttatgcaagaaaagaaaccttaatttacagagaattacaggggcaaaatcagttcgtcacatagagctgcttatacggattctgcgtgttcgggcgcagcacgtagtattcgtcgcgcagaagactttcggcatctgcaccgaacttttccgcgtagttttgaatgagcggcgccgcaatctgcatgtcttcttcggtcgccttatgcgccacgacctgctccggcaaatccttcggcaggtgcgcggtgcgcagataaatgcgtccgccgtgcatacccgtgccgcagaaattgccgaccggctggcgatcttcactgccgatgccgagcacaacgatgatgccgcccgcctgatattcgccgaggaagctgcctgttctgccgccgatgacgagcacgggtactttctctttatactccttcatgtggatacctgcgcggtaaccggcatcgccctgcacgtagatggcaccgccgcgcatggcgtaccctgccgcgtcgcccgtgctgccgtgaatggtgatctcgcccgcgttcatcgtgtcgccggtcgcgtcctgtgcgctgcaatttacaataatatttgcgccgtccagatacgcgccgagcgcgttgcccggcacttcgttcaatataatcgtaccctcactttgccctgcgccgatatagcgctggccgagtgcatatgttttctgttccatgtttctcccccttactgctgctttgagagcaggtcgcggcgcgtacgggccgtgaatgccatgagttgcggcttttcgcagatcagcttaaaatcgattgagcttaacggcgtgcgattacggataagcgccgtgtagataccggcacgcgccacgtcgccaatcaggatatagccctttaaaacatcatctttatagaaaaggatcttgtagttttcgccgtcacagcggacgtaggtctcgccgtcatacgtgcctgcggtgatgatgtgcagccccatgaagccgatggcattcatcgggattgcccggtcaaagctcgctttgccgcccgccatgttgatgccggcggtattgccctgcatataggcgtttggcaacagcgccaacacacggttcacgccggcggaaatatcgaagctctccgcgcagtcgcctgcagcatagacatcgggcagtgttgttttgccggtatcatctgctgcaatgccgcggcgcacctcgccgcctgcatctttgacgagcgaagtattcgggcgcacgccgaccgcaatgacgagcacgtcaaaatcgaccgtaagaccgcttttgagtgtggcggtcgtgcccgcaaactttgcggcggtatcgccgaggtggaactcgatgccctgcttttcaagaaaatccttgacgatagcggagccggtctcatcgaggatgctcggcagcacgcagtcggcaagatcgacgaccgtgatggatttcacgcgctccttgatgccctctgcgcactttaaaccgatgaggcccgcgccgataatcaaaacacggctgtcttttgtaaggacgctttcaagtgcgtgtgcgtcatcgagcgacatgaacgtgaacttttcgggaacggtatcaagcccttccatgggcggtacgaacggcgtggagcctgttgcgacaaggagcttttcatagggtatctcttccccgctctttaacgttacggttttcttttccgggtcgagctttgtgacggtctcaccgagctttgcagtgacatgattttcttcgtaaaagctgtccgggcggtatttcatgcgctcctcatccgttttgccctgcaataaataggaaatgagcgggcgcgcgtaggtgtggtggttttcggaagcaatcagcacgatctctccgtctttatctttactgcggatgccttccacgcagccgatggccgcagtggagttgccgatgattacatattttgccatggtgctcagtccctttcctcaaagatgatggctttgttcggacagccctgcacacaggcgggcttgccgccggcgttttcgatgcacagctcgcacttctgcatgacgccggattccgagggcatcagcgcgccgtagggacataccagcacgcaggtgtggcagccgacgcacttattctggtcgatacagaccacgccgtcctttttggaaagtgcgcccgcaatgcagcttttcacgcacagcgggtctgtgcagtggcggcaggaaaccgcaaagctgacctgattgtccccctcaatgcggatgcgggggtgaatggttctgtccttcagcgccttgatcatgctggattttccggagtttgcaaaggcgcagtaatattcgcaaagatggcagccgaggcaccatttttcatcaacatatactcttttcatggttacgctcccttttctgcttattcgcccgcgtgcttgatgccaagaatctgaagctctttttcgttcagacccacgccgcgcagcataaggcggttgccgcgcagcgcctcgatggaattgatgcccatgccgcccatcatttccttaatctcgtgctcccacgcggtgacaagattcacaaggcgcttatagccgatgtccgggttgaggcgcttcacaaggtcgggacgctgggttgcgatgccccagttgcacttgccggtctggcagcttctgcacagatggcagccgagcgccaaaagtgccgccgtgccgatgtagcacgcatctgcaccgagcgcgatggccttgacaacatcggcgctggagcgaatggagccgccgacaacgagcgaaaccttgttgcggatgccttcatcacgcaggcgctgatcgaccgctgcgagggcaagctcaatcgggatgccgacgttatcgcggatgcgcgtaggcgccgcgcccgtgccgccgcggaaaccgtcgatggcgatgatgtccgcgccgctgcgtgcaatgccggacgcaatggctgcaacgttgtgcaccgccgcaatcttgacgatgacgggctttttgtagtttgaggcttcttttaaggagaaaacgagctgacgcaggtcttcaatggagtaaatatcgtggtgtggtgcgggcgaaatggcgtccgagccctccgggatcatacgcgtgcgggaaacgtcgccgacaatttttgcacccggcagatggccgccgatgcccggctttgcgccctgccccattttgatctcgatggcggcgccggcgctgaggtaatccttatgcacgccgaagcggccggacgcgacctgcacgatggtatttgcgccgtacttgtagaaatcctgatgcagaccgccctcgccggtgttgtagtagatgccgagcgcttctgcggcgcgggcaaggctttcgtgcgcattgtagctgatggagccgtaggacatggcagagaacatgatcggcacggaaagctcaagctgcggggtgatattcgtcttaatcttaccgttctcgtcgcgctcgattttagacggcttctgacctaaaaacgtcttcgtttccattggctcacggagcgggtcgatggacgggttcgtgacctgcgacgcgttgatgaggattttatcccagtagaccggcaggggcttcggattgcccatggaagacagcagcacaccgccgctgctcgcctgacggtagacctccatgatggtctcgccggaccagttggcattttccttaaaggtgtggtcggtcttgacgatcttcaaagcgcgcgtgggacagatggaaacgcagcggtggcagttcacacagcggctttcgtcggagatcatcattttcagctcatcgtcgtaagcatgtacttcgttggagcactgtcgttcacaggcacggcaggcaatgcagcgcgcggggttgcgaacgacctcgtactgcggatataaaaaatcgatagccatttatagtaacctcatttctcagagaacacaaactcttactttttgtccagcgtgaagatgacaggctcgccgcctgcgggcgcccagaccttatcgagcgtgggctgaatgacgcggatggcggattcttcactggcgatgtagaccatatcgcccttttcgccgacgaccatagaacgcagctttaagcggtcgttgagtgccataaggccacccgtaaagccgaccagaatggagaacggaccggtgacgagcaggccggaatacacattgcgcaaatacgtcagacgcgcgcgctcctccgggtctttgttctgaatggtcgtccagaacggtgccgcgatgacgtttgcgacctcttgcagggtgaggccctgacggcgtacaagataatcgaaaatataggtgatgacctcggtatcggtcaaaaggttgcagttgtagccgtacatctcaatgcagcggcggttcgcatcgtaggacgagatttcgccgttatggacaacggaaaggtcgagcagcgcaaacgggtgcgcaccgccccaccagccgggggtattcgtcgggtagcggccgtgcgccgtccaacagtagccggcgtattcatcgagacgatagaatcgaccgacatcttccgggtagccgacggccttaaacacgcccatgtttttgccgctggagaaaatatacgcgccatcgataaaggtattgacgcggttgacgcagcgggcggtgaactcgtcttcatcaagctggctttccgcaagctttgtgtgcagcggtgttacgaagtaccgccagataagcggctcgtccgtgatctgcggaatcttgcggatcggaattttggaaaggttcacgacatcgaaatgctcgttgatgaacttctcacattcctcttttgcttttacattattatagaaaacgtggaacgcatactgttccgcatattccgggtaaatgccgtagccggcgaagccgccgccaaggccgtttgaacggtcgtgcatgatctcaatggagcggatgatatcggagccgtccagccgctttccgctgcgggaaaaaacggaggatacggcgcaccccgaaggaattcggaaatcgcccgctgtgcttttgccttctctaagcatgaagactgctcccttctgaaaacaaataagatatacgtctttttcccggcttttccgaaaaaaagagaaagcctgaccatacatgctgcgtgcaatgcacgcgcgccgttcccccggcgcaatctaaaagccccacattcggcagcttttaaaagcaacatgtatgatcagactccattgtctgcctaccattatatagcggccctttttatatgtcaagaaaaatttcgcaatttttgaatttttgagttgcagtaatttcattttatgttcgcttgactttaaaaatttcataaaacgaatttataaacgcaggcttaaattgtacatcctgcaaatcttcaaattttctcaaaaaaggtgttgacaaatggtccgagacgttgtaaaattcatcacatagcatagcaaaggcgctgtggttggttcaatgccatccccagcgcttttttgtttgaatgaattacgaacagctgtgcagacggtttcgtaaagcgaagccgcaggacgaaacgccgggaagatatacaaattatatcgcagcgttcgcccctcctattatgcgaatcttattgaaggaaagagtggtttacatgagcagcacgacaaagatcaatgtgccggacattttcgccagcatggtgtttaacgacgacgtcatgcgtgagagactgccgaaggacgtttacaagtctttgagaaagaccattgacaacggcaaggacctcgacatcacggttgccaatgctgtggcaaatgccatgaaggactgggcgatcgaaaaaggtgcaacgcactacacgcactggttccagccgatgaccggcatcaccgccgagaagcacgacagcttcatttctccgacggcagacggccgcatcatcatggaattctccggcaaggagctcatcaagggcgagccggatgcttcttccttcccttccggcggtctgcgcgcaacgtttgaagcccgcggctacaccgcatgggacccgacctcctacgcattcattaaagatcactccctgtacattcctacggcgttctgttcctacggcggcgaggtgctggataagaaaaccccgctgctgcgctccatggaagcgttgagcgcacaggccgttcgtatcctccgccttttcggcgactccacgacaaagcgtgtcatcacgaccgtcggcccggagcaggaatatttccttgtcgataaaaagctctacgatgagcgcccggacctcatttacacgggccgcacgctgttcggtgcacgcgcaccgaagggtcaggagcttgaagaccattacttcggcgcgatcaagccgagaattgccgcgttcatgcaggagctcgacgaagagctgtggaagctcggcgtgcttgctaagacaaagcacaacgaggtcgccccggcacagcacgagttggcgccgatcttctccactacaaacgttgcgaccgaccataaccagctgaccatggagacgatgaagaacgttgcgctccgccacggccttgtctgcctgctgcatgaaaagccgtttgcaggcgtaaacggctccggcaagcacaacaactggtcactttccaccgataccggcaagaatctgtttgagccgggcaagctgccgcaggaaaatgcacagtttctcctgttcctcgccgctgttatcaagggtgttgacgagtatcaggatctgctgcgtgtctccgtcgcttccgcaggcaacgatcatcgcctcggcgcaaacgaagcgccgccggccatcatctccatcttcctcggcgacgagcttacagctatcctgcacgccattgagaccggcacggtctacggcggcacactccgcgtcaacatggagattggcgtaaacgttctgccgtccttcacaaaggatacaacggacagaaacagaacctccccgttcgctttcaccggcaacaagttcgagttcagaagcctcggctcgcagctcaacatcgcctgcccgaacatcatgctgaacacgattatcgccgatgagctcgagcagttcgcagacgagcttgagggcaagagcgatgatttcatgtcggcactgaacgcactcatcaagcgtgtcatcaaagagcacaagcgtatcatctttaacggcgacggctatgcggacgcttggaaggtcgaagctgcaagacgcggcctgacgaacctgccgaccacggtagacgcactgccgcactacaccgacgaaaagaacgtgaagctctttgcaaagcataagatctacaccgaagtcgagatgcagtccagacaggacatcatcctcgaaacgtacgcgaagaccatcaacatcgaagcgctcaccgcaagtgatatggtcaagcgcgatattctccccgctgtttcctcttatgttgcggagcttgcaagcggtgttgccacgaagaaggccatcagcgatgacattccgtgcgaagcggagcttgatatcatcaagcgtctttccggcctgcaggactgcgcatataagaagcttgctgcgctcgataacgccatcatcggcgtgaaggaagtcggcgaagatccgattgaggttgcgacctattataaggattccgtcatcaccgccatgaccgagctgagagccgttgtggacgagatggaaacgctggtctcttccgattactggccgtacccgagctacggcgatctgatgttcagagtataaggggctttgaacataccgtttcaaacggacaagggatgaaaaattcaatataggcacaagggtgtgcacggggttccgtttcaggaaccaaacgtgcacacccttttctattttcaaatcactagggcttaaacttaggaggacgaacatatgacaagcgagatcttcagcgtctggtttttgatgggcgcggcgctggtcttctggatgcaggccggcttcgccatggtagaaacgggtttcacccgtgcaaaaaatgccggcaacattttgatgaagaacctgatggacttctgcatcggtaccggcgtattcattctcatcggcttcagctttttgctgggcgaagacttactgggcttcatcggtaagccgggctttgatattttcacaaactacgcaaactttgactggtcgaatttcgtattcaaccttgtgttctgcgccacgaccgcgaccatcgtttccggcgcaatggcagaacgcacaaagttcctttcctactgcatttactccggtgttatctccgctttggtataccccatcgaagcacactggatctggggcggtggctggctttcgcagctcggcttccatgattttgcaggctcctgcgccatccacatggtaggcggtctttccgcgctcatcggcgcaaagctgctcggcccgcgcatcggcaagttcgaaaaggatgcaagcggcaagatcgtaaaggtcaatgccttcccgggccacaacattccgctcggctgccttggcgtgttcattctttggttcggctggtacggcttcaacggtgctgcggcaacaagcgttgagcagctcggctccatcttcctcaccaccaccgtctcacctgccatagcgaccgtcacctgcatgattttcacatgggtaaagtacggcaagccggatgtttccatgtgtctcaacgcttctctcgccggtctggtcgccatcaccgccggctgtgatgtaacagactgcctcggcgcgacattcatcggcattgtggccggtctcctttgcccgttcggcgtttggctgctcgactataagctccatgtcgatgacccggtcggcgcggttgccgtccacttctgcaacggcatttggggcaccattgcagtcggtctttttgcaacgaccacagcccccggcaacgatagcttcaccggcctgttctacggcggcggcattgcactgcttgcaaaacaattgcttggtgtgcttacggtctgcgcttggacagccgtgacgattaccattgtgttcctgctcatccgcgcgacggtcggcctgcgtgtgacgagagaagaagagattatgggccttgacctgcccgagcatggccttgcaaatgcgtatgcagacttcgttccggccatcaacacctcgctcgaaagcgcagacctcagcgttgcccctgccccgttcggcccagctgcggtagacgaagcagtgccggtcgttgtgcatcacgcccccgtgaagaccgaaaaagcggaaagcaccggcatgaagatgacgaaggtcgagattgtgtgcaagcaggcagctttcgataccttgaagaacgcactgatgagcgtcggtattaccggtatgacggtgacgaacgtactcggctgcggcattcagaagggcaagccggaatactaccgcggcacgctcgtagaagcaaacctgctgcctaaggtacaggtggaggtcgtcatctctaaggttcctgtccgcacggtcatcgaaacggcgaagaaagcgctttacaccggtcacatcggtgacggcaaaatcttcgtttacgacgtggagaatgtcatcaaagtccgtacaggcgaagaaggctacgacgccctgcaggatgtagaataataaatcttcccatttaaattgagtacgacgcgtactacgctcctgaaataagaaaagccgagacctgccggttccccccggcgggtcttgactttttctgtcattttctcctgcaacttattttcgattttgcacaaaatgggaattgaactctttttggatttgtgttatactgttataagaatttatccaccccgattgtgagaggagacagccgtgaaaattcaggaatccgcagaaaactatcttgagaccattttgatcttatccgagcgcagcacctatgtgcgttctattgatattgccaacgagctcaattttacaaaacccagtgtcagcgtagccatgaaaaagctgcgcgagaacaatttgatcaccgtagacggcgacggctacattcacttgacggaggacggccttgctatcgccaaccgcatgtatgagcgccacaagttgctttccgattggctcacctatctcggcgtgccgaaggacattgcaacagaggacgcctgccgcattgagcacgtcatcagccaggagagctttgaaaaaatccgcgcgcatgtccgcgaaatgaacgagcatctttaatgaacttaaacagcacaaaacccgtttccgaagcttttaccggaaacgggtttttacttttacagcaacgccatgctctgcaaaataaagatcatcaaaaatacagtcgggatgcagcacacagcgctcaaaacaacaagctgaccggcaagttcgccatctgcgcccgcctgctgcgccatgatgtagcttgataccgcgaccggcgtttcccacgcaagtgcaagcgccagaagactcggccctctgctgcccgccagaaccgcgatcggcagaaaaacaagcggaatgacgacgagctttataaacaccgtcacgcccgcaatacgcatgttgccttttagcttgcggaagctgaaatcaccgccgagcacgataagtgcaagcggtgtggcaaggcgcgaaacatcgcgcaggctcgtttccagaaatgccgggaaacgcaatttaatgatggacgcaaaaacaccgagcagtgccgcgataatgagcgggtttgtcgcgatggatttgagcgtctttttcagcgagaccttacctccgcccgtaaataccgtcagcgcaatgacggccaaaacgttgtacatcggcacgagcacggcgctcaagatggaggccgcggcagcctcctccgcgccgaacacgttcgtgacgagactcacgccgaatatgacgtagttgctgcgaaaaagtccctgaatgatgacgccgcgctgtttcggctcgcgcacgacacgcggcacgacgacgcacagcactgcgaacaataacagtaggctccctaccgcgattgtgaacgtcatgccgtcgatggcctcggtgatctccgttttatagatgttattaaacagcagaaacggcagaaaaaatttgaatgtcagcgtattcgtctgctttaaaaattccgacgagacgaagtttttgtgctttaaaaagtagccgaacgccaaaagcaaaaacgtcggcatgatcgcattcagcgcgaccagaaaactatcgaacacgctgcaccccagctttcacgctttcatgcaccgccatgattttctgaaagcccgcgatgccgacggaaaacgccgttgcgccgcccgccgccgtgcccatggcgagtgcctttgcaaaatcgccggaatgcgtgaattccgccaaaaagccgccgaccatggaatcacccgcgccggtggagtttatcagcgtgccctttgccgccggggcaaaatacacctcgcccgtttccgtatacaaaagcgcaccgtcgcccgccatggaaacaagcacgttttttgcaccgcgttttttcagcccctccgcaagcgccgtcacctgttcctctgtgtccgccggggcacggaacatctcggaaagctcctcgcggttcggctttacgaggaacggctgaaactcaagcgtagacaataataaatcgcctgcggcatccacaatgagccgcacgccttttgtttgcgcaagctttgcaatccgtgcgtaaatgtcttttggcagtgacttcggcacactgccggaaagcaccaaggtatcctgcggggtcaaggcaccgagcttttcaaaaaaatttttgagctcgttttctgaaatctccggaccgctgccgttcagttccgtttcttcctcggcatgcagctttaaattgatgcgtgtaaagccgttttcgacttcgatgaaatcggtcgtgatgccttctttttcaacgccctcgcgcagcgctttgcccgtaaagcccgcaataaacccaagcgcgatgctttttgtattcaacgcgtgcagcagcaaagagacgttcacgcccttgccgccaaacacaatattttccgttttcgtgcggttcgttttgcccgtgcggaacgtgtccgccgtgacgacgtaatccaccgccggattaaatgtgatcgtgtagatcataaaaatccctccaaccaaatcaagtggtttcagcatagcatgattttgcaaaaaaagcaagaaaaagcgtctgcaccgccaaaagacgtatgcagacgctcgattttattttgatttaggcttctaagcgctcaaatttttttgcgccccaacacaccaaaagcaggtgcatcaaggcagacaagagcaaaaggaacgcagtcgttaccgcatacgctgcaatgcccggaatatgcagtgcagataccgcgaaaaacacgccgacgatcaccgccgcaaagaagtacgcgccgaacattgtgacgcatacgctgagggactgcttgcacggctgattttcgctctgccaatcaaagcgcggcgcgagcaggttcatcacaaggccgagcgtgccgacgaaccagcagaacaaaacgcaaacgcaaacggtcagcaccgtgagcccgataccgcacccggcgatgaggcaaagcgccaaaacactgacggcaacaagcggcatttgcaggcggcacaccataaggagcttgcccaaaagcaccgttttgccgcttatgggcatcgtgcgcagaacccacagatttttgccctccaacgagacagacggcgcggtcgcgcaggacgtcgcgatgcaaaacgccatcacgccaaaaatgccgagcgcaatccactcgggtcgaacgcccatcaggcttatcatctgcatcagcttcccgcggaaaatcgcggcggcgatgggcagaaccggaatgaccaccaggccgaagccgaaattcatcaggtacgcggggcttgtgaagaacttccgctgctccttatgcgcaacagacagcaccggcgtgcgctgctttgcggaagctttgcccgatttgtgctttgcacccgctttcgcgcccgatgtacgcacggaggaaatgaaagatgcggaaagccgccaaagcgtgaaaagcgctattgccgcgctcaatacagtcacgagcagcgtgtgcaaaaggcttccgccgcacgccatgccaatagcataaagcggccaaacgtatttcatcgcacccgcgatctgcgtgccctgcatgacgatcccggacaaaaatgagttgacgttcgcgtaaaaataccagtacactgccatgaagatgaccatgtacaaaagcgaaacaaccgccttgttgcgcaggcggctgaggagcttgtgcagcacccagccgagcgcacagcagacagactgcgaaatcaggctcagagccacaaatgtaaacagccacccgatcatcatcgtcgccgatgcaccgtaggaaaacgcgtaaataccgaacgcgggcagcaaaactgccagcgtgtaccctgccgtcgttgtgaacagcattgcaatacgcgtcaagagaatgtactttggcggtatcggcatggaaagcaaccgttcgttgtctttcgcgtcatacaactgcgcctgcgtcataaaaacgctgcccagcatggaaagcgccagcgccattgtgcccgccatggcgaaatacagccatgtaagccccatttcgcacagcggaacaagtgctgcgaacaccacaaacatcaaaatttccatacacaccacaatgaacagcatcagaaaaaccagccatccgccggaggtctttttgccgttgccttttttcatgcgcgccgcaaactgcttccattgcagcttccagagggatcttaacatgcagcctccccctttcagtccttgtggtcttccagctctaagaagacccgctccaaagaaccgtcgccgcgcacgctgtccatggtgccgtgtgcaatgagcttgccgtttttaataatggccacattgtcgcacagcttctccgccacctccaaaacgtgtgtggagaagaagatggcgccgccgtttcggcaatgctccgccataatctcctttaattcgtgcgccgcaatggggtcgagcccgacgaacggctcgtccatcaaaatgagcttcggctcgtggataagcgcgccgataacggcgattttctgcttcatgccgtgcgagcactccgagatgaggttcggcagcgcgtttttaatatccagccgctcggcaagcgcttccatgcgcgccttgcggtccgcttccgatacgccgtacatatccgcaacaaaattcaaatactcgtagcccgtcaggaattcataaagatcaggattatcgggtatgtaggccatgatttttttgcaggcgatggggtctttttgaatgtcgatgccgttcaccgtaatggtaccgccgtccggctttaataagccgcagcaggcttttagcgtagtcgttttgcccgcgccgttgtgtccgatgaacgcgcagatttcccctgccgcaatgtgcagcgaaaggtcgtctacggcgattttgtcaccgaagcgctttgtgtagttttgaatgttcagcatgtgtttttctcctttttcttctttttcacggctgaaatgcggcctttccgaatttcagctgccgagcccattatagacacacggcagaagaatgtcaatgttttccggcgcatgagaatatgtcataaaagaacataaaaacagcgcaactcctacgagctgcgccgaagcgagtcgaattattcttttcctgcagagagcgccgcttcctgctttctgcggcaaccaaacacgagctgatcgataacgacgacgagcgcgccgagcagcacgatgatgtaatatgtgaagaatcgccagacaagcacggcggtgtacaaaatatcgccggacgcaaaatacgatttaaagaacatggagaagccgagctcctgtgcgccagacgcaccgggcagcgggataaagcacacggaggcctgcagcatcgtctgcatacaaagcagttcgccgtaaggcaggtcgagtgaaaacgcacggaacaccacgtacagcacactcatctgcaaaatgacctgcgggatcgaccacaaaattgcaaggagcacatagcgcattttgcttctgaatttcattgtgtaggaggagaaatccgcctcaaagccgtgcactttttctatgtaattctcgcgctttttgagaaacgtacatttcaagagcagctttgtcacgccgccgcacagcttttttaagatcttcgggctaaacaaaagcggtatcgcgataatccacagcccgttgatggcgatgccgagcagcacaatgggaatgagctgcgggtcgtcccgcttcaaactcgggtacatataaatcagcgatgccaccgtgcacagcacaaacgcaagctgatacgcaaaaaactttacaaacagcaccgcagtggagttgccgaccgagaccttatcgcgccgcaggtagacgacctgcgcaggctgcccgcccgtggagctcggcgtgatgtaagaataataaatgccgatgagcccaatcttcaccgttgtccaaaagccgacgtgctcgccctgcgcgcgcagcagcatatggatgatgccgccctctgttacgaggaacacgccggtcatcagcacggcgagcgccacaaacccgagggaaagatttgcgatgacggaaaacatgcccgcaaattcggtattgacgagcccgaacacgatcatcacgaccaccgtcagccccacgtatataagaccccacgggatctttttcttttctttcatgaaaatgtagtctccttgcagaaaaatcgtattttatagtataccatatagcgtttctattggcaagacaagactgacaaccgaaagaaaacgttaaggcagtgccctgaatattcggcactgccttattcgtttattttacttttccccgtgcgcatcccagataattttcaggccgtccagcagaagcgtatcgctgaaagtgatcttgcggctgcaatgcggtacgataagacctgcgaggccgcccgttgcgaccacctcgcacggtgcgccgagctcatcttcaatgcggtcgcacaggccgtccagcatacacgccgtgccgaacaccatgccggactggatacactccatcgtgttgcggccaagcacctgcggcggcgcggtcagactgacggaagaaagctgcgctgcgcggctcgtcaatgcgtcaagcgatgtgccgacgcccggaatgattactacgccgcacacttcgccgtcggcgtttaaacctgtcagcgtcgttgccgtacccatatcgatgacgatacacgggccgtggtacatggcttttgccgccacagcaccgacaacgaggtcggcgccgagtgtgttcggcacatcgcgcttcactttcagctccggcacagactgcgcgctgacgatgaacggttccaccttccaaacacggcgcaccgcgcgggcgaggtcatcggtcagccgcggcacaacggagcttaaaaccgcgccgttcacctgcgacgtgtggatattgtataaatgtaaaatgctgagcattgcagaagcgtattcgtcctccatgcgcggcggattcgtcgccatgcgcgtgacgaacagcagcttttccccctcataaacgcccagtgtgatgttggtatttccgacgtccagtgccagcagcatacctttcccctccgaaaacaattttctttgagagcagtatatcacaaaaacacaaaaacgtacagaaaaagttttacccgaaaagccgcaccgaaagcagcgtgagcagcacggcggcaaggtcgccgcaaaacgccgccggaatcgtgtagcgcagcgttttatacccccgacccgaaaaatacaccgcggccgcgtaaaacgtcgtttccgtcgaagacgataaaattgccgccaatcgggatattacactgtccgcaccgtatgcgccgtaaagctccgtaacatacgacaccgagccgctgcccgaaagcgggcgcagtaagatgagcggcataagctccgtggggatgttcagcacttctgtcacgggccgcagcagcgcggaaaacagctctaaaaagccggacgcgcgcagcatggaaatgccgacaataagtccgagcagtgtcggcaataattttatcgccgtatgcatgccctccgccgcgccttttgtgaacagctcaaataccggcagtccttttacgtacccgcacatgaccgtgagcgcgatcacgccgcagacagccgccgcgcctatgcccgccacaatttttgaaacacgcggcacatcagcacgcagacgagcaggctgccgaatgaaacaagccaaatatgcggcataacatcatacgggtccgcgctgccgtaggaagcccttaaggtgaccgccgccgaggggatcagctgaaacgaagccgtattcatcacgacgaataagatcatctcttgcgtcggcacgtcgcccgtctgtaatttctgcatttcgtccatggcgctcaatccaaacggtgtggcggcgttgcccatgccgagcatgtttgcggcaatattcatcgatattttttcgcgcacggtttcattttttccgtaagtcggaaacagtcgcttgatgaccggcgacagaattttggaaagcccgtttgtaagccccgcctcccccgcaatacgcatgatgcccgtccaaaggcacatcgcgccgagcagcaaaagcaccgtctccaccgcctgccttgcgccatccgccgcagcagcggaaagtgccgtccatctccccgtgcacaccgcaccgacgaacgccagcacgatcatcgccatccagatgccgttcagcatcctaccctcccctttcattttatttctctgcggaaatttacagagttttgattgattttaacacaaatatggattatgatagaggtatattcatttggaaaggatgaaatgtatcatgttcggtgaaaaaattctcgattactgggacgatataatgaaagacctcggcgatatcatcgccattccctcagtcgcacagccacaggacggcccgtatccgttcggcaaggacgcagcaaccgctgtggataaggcgatagaaattgcggaacgatacggcattaagacgaagaacagcgactattatgcaatgcacgcagagctcggcgagggcgaagaaaacgccgttgttatggcgcaccttgacgtcgtgccggccggcgaaggctgggacagcgacccgtacaccatggtcatccgcgacggcaaggcattcggccgcggcgtttccgataacaagggtccggcaatcgttgcgctgcactgcctgcgcgcgctgaaggaagcgggcgtcgtcggcaaacgcaagctgcgcgtcgtgctcggctccgcagaggaaatcggcatgcaggatatgggtcactacttctccaaagagcagatgcccaccatgggcttcaccccggacgcctgctacggcgtgtgccactgcgaaaaaggcctgttccgctttgccgtaaccggcaaggtcggcaagaagatcgtttccttcaaggccggtactgttgtcaacgccgtgccgtataaggcagaagccgacgtgctctgtgatgacaacgaatttgcaaagcttgtcgaagctgcaaacgctgcggaagtgaagttcgacatcacacgcaccgaaaacggcgcacacatcgtcgcaaacggcaaggccgcgcacgcttctaccccggagatcggcatcaacgccgccgcacaccttgcacgcctgctcgtgaacgttttcggcgcagactgcggtgaactcctcacgttcatggatgagaaagtcggccttgcatatgacggctccaacatcggcgttaagatgtccgatgagccgagcggtgcgctgaccttcaacctcggcctcgtgaacatcgaaagcggcgagggccgcttcgatatcgacattcgctacccggcaacaaagtccggcgcagagatcgacaagatccttgcaaagtccgtggagggcacaggcctcacctacacgctcatttccgatgagccgccgctgtacctgccgaaggacggcccgctcgtcagcctgctttccggcgcttatgaggacgtcaccggcaaaaagtgcgacgtcttctccatgggcggcggcacgtatgcccgccagatgggcggcacaggcgttgcgttcggcgcatcgttcgacgaagaggaatcgaacgcgcaccaggcaaacgagtgcatcaatgtggagcagttcaagctgcacgcacaaatctgccttgaggccatgtaccgcatgtttacagcggactgattttgaattcaggagcgcaccgttatggaatatgcacatatcatgccggaggacattttaaaaaatcccgaagtgaaggtctacgtggaggcgggcaacagctgccttggcgcactgggcttcacggagcacggccgcccgcacgccaagcggtgcagcaactacgcgcggaacattctggaagcgcttgattacgatacgcgcacctgcgagcttgccgccatcgccggttatctgcacgatatcggcaacacggtaaaccgcgtcgaccacgcgcacagcggcgccattatggcgttcacgcttttaacgcgcatgaacatgccgccagaagaaatcgctatcatctgctcggctatcggtcaccacgatgagaaaaccgctttcccggtaaacgccgtctccgccgcgctgatcctctccgataaaagcgacgtgcgtcgttcccgcgtgcgcaaaaacgcgattatcgcaacggatattcacgaccgcgtgaattacgccgtcgtgaacgcctcgctgaaaattgacaaagagcagaagctttgtcttttcaacattacgattgatacggacatctgccccgtcatggagtatttcgagattttcctcgaccgtatggtgctgtgcagaaaagccgccgatcttttggggctcacgttcgagcttatcatcaacgacacgcgtctgctgtaatacgaatcacacctataattcctagaataggagccgcagttcacacattatcgaactgcggctcttttgttttatcgtttgttcattttttcgccgtgtaaattcacgcctgcggcttcaatgccccgtaaaaataactcgccgtcgcgcttgtataaattcactgtcaaaatcgctttaaccggcgcctgactcgccgaaacacccgcgcattccgtgccgtcaggctcagcacctcaggccgcgtgttattctgcaaacttttctcctttgcaatacaaattttgtactcctcgtcacgcggcacccaagcgattcgccttttccaatataattttctctgagataacgtttacttttttacacagtttttatataatgctttgcataccttgggatactgatccatatcaaattttctcgcaaacaaataatccgaagcgatcagttcctcatagtccccgtcctcaaacgtatacggatttccgcgcttccagtcaatccaccgcatgtttgcgtggtaatcgtcagcttccggcggcatcgatagatttccggcaaatgccgactgcatcactaaagtttgcaggaaacactcatcgacacagcagccataagaaaacgcagatttaatccagtcctctttggacaaaacgtactttgcaagcgcgcccgtaatgctgaaccactgcgaaccgcaatacagcctctccatgccgtttcgcttcagccggtcaacccgaagcagcttctgcatctccacaagaccgcgctccatataatacagccatccggtcggtctgcccaccttttcctgcagcaaatgatagcactttgcccgctcctgcgtcctctcctccatggcaaaatcatgggcggaaaaatggataaattccgttccccgttgctcgaagaacccccagatttcctgcgccggacgcagcggcagatccgcgccggacagcagatgataatagctgtaatcctccccggaattcgccgcggctttcaataagttcagctccgcttgtatctgggaatacccgccccagtttacccgcgtgcgctccgcaaacttcatcttggaatggcgcagcgaaggccggaacgaatcggcatcaaagtccgtcacatgcgcatcgatgtgcatataaatgtcgttttgctcaaaatccaacatctcgcacagcattttgagctgctcaaacttgttgtgcgcaataatcaaataggcgtgttttcccacgttgtctcctctttccgttttagaatttcccgcccgggccgtcaaagcacacgaaagcccgttgtgtttccattatatatttgaagcaaagcagtgtcaagtatatatataaactttacaactttagttgaaattcgcaaactaaaattacatatttattttcctctaatcaagcatacaaaagcagcgcaccggcagatttttaccgcccgtgcgctgactggattttctgttcttctctttacatcgtaccgaagatacggtcaccggcgtcgccgagacccggcagaatgtaaccgtgttcgttgagcttctcatcaacggctgcacagtaaatatgcacgtccgggtgcgcttcgctcagtgccttgaggccctccggcgctgcaatgatgcacaggaacttgatactgcgcgggcggctgcgctttacaatggtgattgcgtccattgcggaaccgccggtcgcgagcatcgggtcaagcacgataacatcacgctcttcaatgtcggacggcagcttgttgtagtattcgaccggctgcaaggtatcgtggtcacggtaaagaccgatatggccgacctttgcgctcggaacgagctgcagcatgccgtctaccatgccgagaccggcgcgcagaatcggcacgaacgccagctttctgccggcgatgaccttcgtcgttgcggtgcacatcggggtctccgtctgcacgtccatcagcggcaggtcacgggtagcttcgtagcacatcagcgttgcaatctcgctgacaagctcgcgaaattcctttgtgccggtgttcttatcgcgcaggaaagagagcttgtgctgaatgagcgggtggttcatgataaaaatctgttcgttgttttccatattgatttctccgatttctgccttacaggcgtccgttttcaatatctgcgatctggtcgatacggcgctggtggcggccgccctcaaagtcaaacttgaggaacgtgtccacgatctccagcgcggtcttctcctcggtgacaaggccgccgagacacagaatgtttgcattgttgtggcggcgggtcatttccgctgcgtgggcatcgctgcacagtgccgcgcggatgcccttcaccttgtttgcggccatggaaataccgatacccgtggagcaaacaagtacgccgtaatcagccttgccgtctgccacgcagtgcgcgacctttgcgccgtacaccgcatagtccacgctctccgtggaatagcagccgaaatcttcgacttcgatgcccttcgcttccaaatgcttcttgacggcttctttcagagcgaatccgccgtgatccgaaccaactgcgatcttcatgctttattctccttcgtatatggattacttattgtttttctgtgcgtttttggctttcagttcacgctccgcctgcggcagacgcaggtagattggcatcaaagcgtccggcgtgaccgtctgtccgttttcaaccatctcctgcgccgccatggcaacgccggaggcacgctgaaaacgaagctgcggcagcaaaagctctgcacggatagccgcaaacgtcttatagcaaagctccgcgccatcgccgacaagataaatcttctccgtaaacgttttgcattcttccaaaagctccgcaatgggcagtgcgcggtcatcacaaagacgtgtgagcttaccgtcctccgcacggaacagcgcattatacacctgcccgcagcgtgcgtccatcacagcacagacgatacccgtcagctgccgtgcgttctccgccatagcgcgcagcgtggaaacgcccgcgcacgagatgttccgcgtcatggaaagtcccttcacgcaggagacgccgatgcgcacccccgtgaacgaacccggcccggcggagaccgccatgcaggtcacatcgtcaagcgttttattcgtgagcttcaaaacagattccaccatcggcatcagcgtctggctgtgcgtctgctttgtgttgatataaaattcagagagtatttttccgtcctccaaaagcgcggccgaggccggcgccgcagaggaatcgagtgctaaaatcagcatatttgtcgctttcgcgcgattttttgccgcgcaaaagccgtcctttctatcagaaacttatcacaggtctatgccctcaatggtaacgatgcgctccgtctccgtctcgcccttttccatgtggacataaatcgtgttttccggcaaagcgccgtcgatgttttcgctccactcaatgacgagcacgttgtccgtatcgaggtaatcgaaaaagcccgtggagtagagatcgtcccaaccggaaacgcggtacatgtcaaagtgctgcaccgtcagccgcgcatcgtattcgttcacaagcgcaaacgtcggactggagaccacgtccccgccgccaagcgccagtacaagtccgcgcgtaaacgccgtcttgcccatgcccatcggtcccgtgaacgcgatgacctcgccgcccttgagcttttccgccagcttcgccgcgattttttcggtgtcctgcaccgagtgagaaacaaaccgttgcatcagaacaggccgtggatcacgccgttaccgtcgacgtcgatcttttcggcagacggcaccttcggcagaccgggcatcgtcatgacatcgcccgcatacgcaaccacgaagcccgcaccgttcgagaggcgcaagtcacggattgtaatgttgaagccggtcggacggccgagcagcgtcgggtcgtcagaaagcgaatactgcgtctttgcgatgcacaccggcagcgcgtcgccgccgagcgccttgatgtccttcagggacttcatcgcctgattcgtgaacgtcacatcatccgcgccgtagattttctgcgcgatcgtgcggatcttctcctccactgtgagatcaagatcatagatcggcgcaaagtggctttcaggattctcgtcgatgactttgcagacggtctttgcaagctccacgccgccttcgccgccctttgcgaacacttcggagagtgcatactctacaccgagggacttgcagcaatcgtcgatgactttcagctccgcgtccgtatcggtgccgaagcggttgatggcgacgacgaccggcacgttatatttatgcatgttctccacgtgtgcgcgcaggttctcaatgcccttttcgagcgccggaacattctcctttgcaagctctgccttcggcacgccgccattgtatttcagcgcacgaaccgtcgcgacaacgacgatgcagttcggcttgagacccgccaaacggcacttgatgtcgaggaacttctccgcaccgaggtcggagccgaagcctgcttccgtaatgcagtaatcgccgagcttcagcgccaagcgcgttgcgcgcacggagttgcagccgtgagcaatgtttgcaaacggaccgccgtgcatgatggccggtgtgccttcaatcgtctgcacaaggttcgggttgatggcatctttgagcaaagccgtcatagcgccatccgccttgatgtccttcgcatagaccggctttccgtcatacgtatatgcaatgaggattttgccgaggcgctctttcaggtctttcaaatcctttgcaagacacaaaatcgccatgacctcgcttgcgacggtgatgataaagccgtcctcgcgcgggatgccgttcaccttactgccaaggccgatgacaatgctgcgcagcgcgcggtcgttcatatcgacgcagcgcttgatgagcacacggcgctggtcgatgcccagcacgttgccctgctgcatgtggttatcgagcatggcgcacagcaggttatttgccgaagtgatggcgtgcatatcacccgtgaagtgcaggttgatgtcctccatcggcaacacctgtgcgtagccgccgcccgcagcgccgcccttaatgccgaacaccggacccagagacggttcacgcagcgcgatgacggcctttttgccgatcttcgccatagcctgaccgaggccagccgttgtggtggtcttgccctcgcccgccggcgtcgggttgatggccgtaacaaggatcaacttgccgtccggctcgttttcaagtcttttgaacaggtcatcattcagctttgctttaaagcgtccgtagggctccagctcttcgggacatacatgcagttcttccgcgatctccgcaatcggtcttaattttgtctgttgcgcaatttcaatatcggtaagcattgcaaccaacctttcatttccgttcttttccgttttgccgcacgccgcagcatgcggacatcgttatgccttatagattatagcgcaaaaaggcgtttccgtaaagaggaacgcgcttttttaacggaaaaaatctggatattgccccttccttttctgtgtgatatactaaaatagaaattttgttgaaattttgctttttattcctaacatcttacaaagacttttacgctttgttttactttggcttcttctgatttttttgaaagcaggtgatcttacgaaagacagccgcattttccttgctgtttcgtcctttttccgccgtacggacaagcttctttggcttttgatgctcacaatatccacgttcagccttattcttctgaaaagcgtttcccgcgcgatgaacacggattatttcaaaacgcagctcgtcgtgaccgttgcgggccttctcgcggcgcttgtactctccttcatcgattacgaaagcattgcgtcgttctggtatctcatcgcgggtttttccgtttttatcatgctctacaccatgtttttcggcatcagcgtgcagggcagcgagggcgtcaacgcgcgcgcgtggatcagccttgcgggccgcacgttccagacgagcgagcttgtgaaaatctgctttatgctgacgtatgcaaagcacatctccgttttgcgcgtgcaaaataaaatcaatcaccctctgcacgtcgttctgctcgcgctccacgcggcggtgcccgttctgctctgccatgttcagggtgatgacggcgccgcgatcgtttttttcttcatgttcctgtgcatgagcctcggcggcggtgtgcagctgcgctatttcattttgctcggcgcgcttgtcgccgtgtccgtgcccgtgctgtggaaatttgttctcagcgaataccagatcaagcgcttcacatctgtctataatctggacgacccatctattcagctcaatgaaggctaccagcaggtgcagggacgtatctccatcggcagcggccagctgaccggcaaagggctgtttaacggtccgcgtgtcgaaacaaacctcgtcacgttccagcacagtgattttatcttctccgttgccggtgaggagctcggcttcatcggctgcaccgccatcatcgtattattgttagtgtatctcctgcgcgtgctgtatatcgcgtcaaaggcgagggacgacctcgggcgctgcatgtgcttcggctttttcgggctcatcgctttacagtccgtctcaaatatcggcatgtgcctggcgcttctgcccgtcatgggcgtcacattgccgttcttctctgccggcggcagcagtgccgtatgtctgtacctcggcttcggcctgatacaaagcgtatacatgcatcgccccgacgccaacgttcctcacctgcgcagtacaagaacgctgaaaatgaacttccgtaaattaaacgcctaagcttccggtaaccatggctaagagtctttcgtcaagttttcttcgagaaaacttgcgggttcttaggacaacgcccaaggcggcaaaaacgccgccttcagaaaaacaacccccaccaaaaagcgtatcgctccgagcttcaaaagccgcaagcgatatgcttttattcttcctgttttttcacgtacaaatatgcgtttttctccttacccacacgctccaaaacacccatggaatacagcacattcgctgcacactgcgcttgcgtctgcgcgcgtcgcatcgcttttgcaagcgttttcgtcgtaaacggctccggcaggtcttcgggcagcaaattcaaataatcccaacggctctcgcagatcacttcgccgagcagtgcttccgggatacgctccccgcgcgtcgcgcgcagcttcttttgcttaccgtaaccgtcgagatacttgtagtccgtcacctccaaaagcgggatgcacagccggaaattcgggtgcataagctgatttttgatcttatacagctccggaaaaacatcatacgctgcgccttttttcggtgattttcgcttttcgaagatctcgcctgtttcggggtccacccagcacagcccgcgctttggcaccacagggtataccaccgttacgcgcgccgcttccaaaaacacgtcgagtttgcggctcagccggtcaaacccgcgcgtttgaatttcgatgattccgttttcgccgacaatatccgccacaaagccgcccaccttcacttcgcggctctcaaaatcgggttcgtagtagcttttcagcgccgcgtgcaaagctttttccgaaagcgtaccgataccgcctgcgccgccaacgcgccccagcgcctcttttcgcgcctgtaaaaaacgttccgtgtcgatcaccgtgctccccctctctgtcggtttataaaaacagtatatcgaaaaacatggtaaaaagcaacagaaaagggcggcacagccaaagccgcaccgccctaagggaaacatgtgaagatttagaaacggttacgctctgcgctcaaacgtgcagcattccgtctcgctgacgacctccgggtctgcgcaacagcaacccacacagacgcagtccgcgctgcacttgcggttatcgttatacgtgcagtgctcggcgctgcaatgcacatcagctgtggcgctcggtgaagacgagcatccacaggagttttcggaggaagacgtgcgctctgcataagagccgcagcaggtctcgcggctttccagcgcggcggggccgtccacctgaattttgcgcagctcgcacaggttgtttgcgttgtgtcggcaggtcgtcacgctacatttcagcttgttcatatcggtccagatcctttccttttgaatttctaagttcgtgccgcactttggcgacttctttagcctgcccgcaaagccgggttttatgcaaaagccacatcggcgaagtcttccgcagcggctgcaccttcacccgcggctacggcaagatcttctatttccagccgggccacgagacgaacggctccttctacaatccgtacgtccgccgcatcatccagaacgccgtgcgttggtgctataatgataagaacagacgcatcaccctcggcgcaccgagcatcgaagtcacgctcgagcaggctcgccttgaaggcaacaccggcgaatacctcaagatgtgggactaactcgcttttctaaaatagaataattttaccgtttcgcagtccacggctctgtgtttgcagcgccgtgggctgcttttcttttatatcctgccccgaaaacccgcacagcgcttgaaaaaacacggaagatatggtatactaaaccgatatcgcccgagcggcgacgcgtgtgcgcgatccgtttcgtgtattcgcatattttatacggcaaaagagtaaaactactggtatattgttcttttattcttttgaaaattctttttgaacactcaaaaaagtgtttgcgcagtgattttctgcgcgggaaggagccctttatcatgaaaaaaacagtttgcgtgatcttcggcggcgcgtcttcggaatatgaagtttcgctgatgtcctccgcttcgatcatccgaaatctcgatacagagaaatttgacattctcaccctcggcatcacaaaggacggtcgctggctgctctattcgggtgctgtggaaaacattgaaaacaacacgtggatgaacagcgaaaccgcgcgccccgcgttcatctctcccgataaagcgacgaacggccttgtcgttctgaacgcagacggcagctataccgttttgaaggtcgatgtcctcttccccgtgctgcacggcaaaaacggcgaagacggcaccattcagggtctctttaagctcagcggcatcccgtatgtcggctgcggcacactggcttccgctgtgtgcatggataaagccgtcacccacacgctgctttccgccgcgaacatcgagcaggcgcactacttgtggttctacgccgaccgctatttcgcagacggcgagaagatccgcaacaaaatcgccgcacgcctcaatttcccggtgtttgtaaagccggcaaatgcaggctcctccgtcggtgtcagcaaggtgacagctcccgaaaagctcgacgccgccatccgccttgccgccgaaaacgatacgaaggtcgtcgttgaagaaggcatcgtcgggcaggaggtcgagtgcgccgtgctcggcaaccgcggcaaaagcgtcgcttccccggtcggcgagatcggtgcgggtgcagaattctacgattatgacgacaaatataagaacggcgtcgcacagctcttcatcccggcgcgtctgcccgaagacgttgcggaggaagtgcgcaagacggctgttcgcgcctacaacctgctcggctgcgacggcctttcccgcgtggatttcttcgtcaccgaaaaggagcacagggtcattctaaacgagatcaacacgctgccgggcttcacgtccatcagcatgtacccgaagctctgggaaaacgccggtaccccgtacagcgagctgcttgaaaagctcatcgactgcgcttttacgcgtgaagactaacgcgaggcgcaatttatggataacagacccatcggcgtatttgactccggccttggcggcctcaccgccatgcgggagctgattcgcaccctgccgaacgagagtatcctctacttcggcgataccggccgcgtgccctacggctcgcgcgggcgcgagatcatccgcaaatacgcaaaacaagatatgaattttctcatccgacacgacgtaaaagccgtgttggccgcctgtggtacggtcagctctgttgcccgtgacatcggcgatgcgctgcccgtcccctattttgatgtgctgcgccccacggcgcgcgccgcggtggagcaaacgaaaaacggcaagatcggcattatcggcaccgccgccaccatcgcttccggctcctaccgcaaggagatcgagcgtctcgcgccgaaaaccgaagtgttcgagcaggcgtgccccttattcgtgccgctcgtagaaaacgcgttcgtctcgccggatgaccctatcccgcgcctgacggccgagcgctacttaacgcccatccgtgaagccggcgtagatacactcattctgggctgcacgcattaccccatcatcagcgagaccatccgccgcgtcatgggcgaaaacgtcacactcatcagttccggccgcgaagccgccaaaagctgccgcaccgtgctggaggaaaacggtctgctgtgcgacggcaaaaccgacggcacacagcagtattttgtcagcgacgacaccgaaagcttttataaagtcgccgagctcttcctcgggcaaagcgttgaaagctgcgtggaatgtatagatattgaaaggtactgagtgattatgcgcgaagattacgaaatcaccatcatcggtcgccaaacgattgacgcacagaccgatgaaattcaggtggatacgctcggcgattacaccgagcgcggcggcgcaaagtatatctcctacacggaatatgccgatgaagcgccgtataacggtcagctcaaagtgctcaaaatcgaaaatgaggataccgtcaccatgctgacccccggcacgcccacccgtctggtgctggaaaaaggcaagcgccacaaatgcctttatgataccggcgcaggcgtgctctccctcggcgtatatacacagacgttaaagcatgacctttccgctgcgggcggtgagctgtgcatccgctatacgctcgacatcgatacccagctttcctccagcaacgaaatctgcgttcgcctgcgcaagcgtgatctattcaataaataaaccgaaaggaacatcccctatgtctaaagcagtaagcattgcaaaagaacaggtttctgccgtcattgaagcggcgatgaaaaaagcgatgactgcgggcatgctgcccgaagcagagctgcccgctttcaccgtagaacgcccggcagaccgctctcacggtgatttcgcaacgaacgccgccatggcttccgcgcgtgcattccgcatggcgcccccgaagatcgccgcggctatcatggaaaatctcgacctcaacggcacctacttcgttaaggccgagaccgccggccccggcttcatgaacttcttcctcggctccgcgttttacagcgatgtgctgaccgaagtgctcacaaaagacagcgcatacggcagaagcgactacggcaaccaccgcaaggtcatggtcgagttcgtttccgccaaccccacgggtcccatgcacatgggcaacgcccgcggcggcgcgctcggcgattgcctcgcctccgttctggatgccgcaggctacgacgtttggcgtgagttttacgtcaatgacgccggcaatcagctcgacaaattcggtctctccctctccattcgctaccagcagctcttcgcggaaaatccgccggagctcccggaggacagctaccacggcgaagacattcttgacctcgccaaagagtacgccaaagagcacggcgatgaactgatgcacgtcaccgaagaagagcgccgcaaggcactcgtcggcttcggcctgccgaagaacatcgcgaaaatgaaggccgatatggaaaaataccgcgtccattacgaccgctggttcctcgaaagcgacctgcacaaggacggcgaagtcatggctgtcgtcgattacctgcgcgaccgcggcctcacttacgaaaaagacggcgctgtctggtacaaggcaaccgagttcggcggcgaaaaggacgaagtgctcgtccgcgccaacggcaacccgacctactttacggcggacatcgcctaccacaagaataagttcgaccgcggcttcgacctgctcatcgacatctggggcagcgatcaccatggccatgtcgcccgcatgaagggcgcgatggacgccatcggtcagagcgccgataagctcgacatcatcctcatgcagttcgtccgtttgatgcgtgacggccagcccgtgcgcatgagcaagcgtaccggtaaggccatccagcttggtgacctgcttgatgaagttccggtcgattccgcaagattcctctttaacatgcgtgaagcgaactccctgctcgacttcgacctcgacctcgccgtgcagcaggattcccagaaccccgtgtactacgttcagtacgcccacgcgcgtatttgcagcatcctgcgcgcactggaagccgagggcgtcaccccgcgcgactgcaccgcagaggagctcgcactgctcaccgcgccggaggagcttgagctcatccagcacatcgcgtcttacaccgatgagatcatcggcgccgcaaaggactacgacccggtacgcatcacgcgctatgttatcgagcttgcaacaaagttccacaagttctacaatgcctgccgtgtaaagggcgaggaagaaagcctcatgcaggcgcgtctcaccctttgccgcgccaccgcaacggtcattcgcaacgtcctcaccatgttcaacatcaccgtcccgacgtccatgtaatcataaactgcaaaggagtcgctcacgtttccgagagcgactccttttgtataagaaaaccgacggcacaagttccctcatgccgtcggttttttctatcctgttatgcgcaaatgtgtggtattacacgttatactctaaaatttgccggtagattattcgcctgcgagcttcttgccaagcgcaatgcacgctgcgtctgcttcgtcgtccggtgcttcgttgcagatgacgctgtcgcctgcgaagaccgcgccgtcaccaaggcaggtctcttcccagttacgcatccattcgccgtcgccccagccgtaagagccgaacaggccgatcactttgccggaaagctttgcttcgcactcggtaaacaccggctcaaactccgtgtcttccagctgctcggagcccatagacgggcagccgaacgccacagcctcatagttatccatcaagtctgcggagaactctgtacagttatatacatctgcttctgcgcccgctgcgcgaacgccttctgcaaccttttccgccatcatctgggtgttgcctgtaccactccaataaacaactgctgttttacgcattttttgtaacctcttttcaaaaatttctttatatgtcaggcagctacggtaagctgcaaaacacttctgccttcctgccacaaacgcttgtagatgtcccggcacttcttataccgcgcaaatgtgcgcactgcctcgcattcgttgcagtacaccttccaacatccgcagcacttgcagttttgcccggcgttttcaatgaacccaagcacgtcctccaccgggtagccgaggaaaagcccaatctcatgcgggaacccgtctccgcttgcaagccgcatgcgcagccgctctatcgcgccgtccacgctcgtgtcggtgtagccgtagcgctccaaaagctcctttgcgccggggcgctccaggtcttttgcaagctgcgtgcggcggcacacataaatgagcatcgcattttcttcgcgctttaagatcagcagctccacgcctttatcgcggaatatgcgattcaaatgctttacatcgtcctccgggtcctgcgccgcgtggtaggaaaataaactcgccgttttaagcgacgccagcgtcggcgcacaatgctcgatcaagtatttctcaagcattgaaagcacgctctccgcgcacagccgcacagcaatctgccagtacactgtgcagcgccgaggcactgctgctcggcacatacgcgatcggaatgttatttcttttcgcttccttggaagcgctcagcatcattttgtgcgagaccgtgctggtgaaaagcaaaaggtagtccggcgtgccgagcttctttttcaaggagccgttctccttcacatacacctttgctttgcagccatggttcttgcagatgtccatgtactgacataccatgcgttcattgccgccaacgatcactacgctcatattctatcctttccgcctgcaaaagcgtttcacaggccgcccgcaaaaccgggctttgcatttgatttaagttagcttacgctaactattttgctttaaattaagcggattctcaccgctatgtgttattcttaaagttagtataaactaacttgttcatagtatactaaactcgtatacatttgtcaacccctattttgattttttattcggaagctttcaccccgccgtctttcacagaacgaaagccgcgttccataacccggctttatcttcatttactctgcttttacctatatccccaatgcccgctcttcttgcgcagcttcactttcccccgagacggcagcgccgcagcccgccgcacgcaagaccggcacgcaaatttccgtaaaaaataagcgcagagaattcctctgcgccaagcttatttttcgtttttcaaaaaggcttcctgcaccgattccgcgcggctttcggccacaagcaccaacccgcggcgtttgtctcccgtcagcacggcgctttccccggccttcagcccgataagcgccaaggcctctttcggaatatgcacaccgccgttttcgtcgatctgcaccgtccacattttgcggcctttcggcacccgtttttccatacgccgctccttaataatacgcggtcagcggcacattaccgttttccttgcccgcgtccatcttcacgctgtctatccactgcactgcgcgtcctgcgccgagaatcacgcagtcctccggctcttccgcaatgcgcacgcgcattttcgtctgcttcgagataagcgtgtccaacccacgcagcttcgcgccgccgcctgtcagcacaatgcccgcgttgccgatgtctgccgtcagctccggcggcgtctcctccagcacactctgaattttgtgcacaaccttcacaacggattccagcatggcttcgccaatctcgtcggaggtcacttccacctttgcaggcaggccgttgcgctcgtctctgccgcgcagctcgtatttttcaatgtccttcagcgggaacgcgcagcccacggcgcactttgccgcctctgccgtctgctcgccgataatcaggtcaaactttctgcgcgcgtatttgataatatcctcgttgaacaccgcgccgcccacggcaatgctgccgcttacggaaaggcgattcatcgaaagtacgccaatgtcgctcacaccctcgccgagcgtgacgaccatgctgccgtgcggacgggaaatatccagccccgcaccgatcgccgccgacaccggcgcttcgatcaagcacaccttgcgaatgccgttcgccgccacagcgtccaccaccgcacggcgctccacttccgtaataccgctcggtaccgccacaacggcgcgcggcatgaaaacgcggctgttcgtcacctttttcaggtagtgctgcagcgtcgcgtccatcagcgtcaaatcggaaatcacaccgcccgtcacgggcttgaccacgcgcacgcgatcgctcgttctgccaagcattttatacgcgcggcggcccacggccaccacacggttagagtcttcatctacggcgatgacgttcggttcatccaccacaacgcccttgccgtctacatataatctgaaatttgccgaacccaaatcgatcgcaatatccgtaccggccatggtaccatcctctcgcgttatactgtcctttattttacatgactttttcccgttttgcaaggtctaatcgaccgtcgcgcacgaaacacagcccacatagtccgccccgtttcggtacaacacctttgcgcattccacggccgtcgcgccggtcgtcacgatatcgtccaaaagcagaatgcgcagccgcgccgcaccctctgcgcggtacgccccacgcacattcgcttcacgttccttggcgctcaaattgtgctgcgtgcggttgtgcttcttcttctccaaaatatccgtgcggcacggaatacccgtcagcttcgatacctcttttgcaagcagcaccgattgatcgtacccgcgctgtttcagcctctcccggctaatgggcaccggcacaatacagtcccaaacccggtttttatcgatcgccggcagcattaactttgcaagcggtttcgcaagtttcgtctcgtttttgaacttgaaccgccacaaggatgaccgaaacggctccttgtaccgctgcggcgcacggcattccagtgtgtaatcccgtcttcctgcatgcaacgcgaaaaaccgcacgcgaatatccggctgcagcttcgcgcagtccgcgcacaactcgtccccgttcaccgctcccgcacgcccgcacaaaaggcatcgcttcgggtaaaagagcatgagaatcttctctaaaacgatcatgcttccgcttcctcattctgctccggcccgtcttcctccggcttttcgagcaaaaagtgctgcaagccggaaaaccgccgcgtctttttatcgttcgccaccatatcggcgactacactgcgcttgccaaccaaaatcagcagctttttcgcacgcgtaatgcccgtatacagcaaatttcggtagctcagttgcggcgcgcccgggaacatcggcatcaccaccgccgtaaactcattgccctggctcttatgtaccgtcacggcgtaggcgagctccagttctgctgccgcgtgctcaaaatcatacagcacctctttgtcgtcgatttccacacgcagacaaccggcatctttatccacatcgatgatgatgcccatgtcgccgttatatacgccttcgcccaccgtgccgtcttcgcggctccacggcaggttgtagtcattcttgatctgcatcaccttgtcgccctcgcggaaaaccgtgccgttcaccgtcacctgcggcttgtttttcgcgggcgggttaatctgctcgcgcagcttacggttcagctccaccgtgccaagctcgcccttgcgtcccgggcataatacctgaatgtccgtcaccggcgaatacccgtagcttttcggcaggcgcgtcaccacgagcgactgcaccgtctccgaaacggagcgtgcatcctcgcgcggcataaaaaagaaatcgttgctgcgcacggaaagctccggcatctcgccctctacaatcttgtgcgcgttcatcacaatgagactctccatcgactgacggaaaatctccttcagttgcactgttgggaataccttcgacgcaataaggtctccgatgacattgcccggcccaacgctcggcagctggtcactgtcgccgaccaagatcaaacggcagccgatgggcagcgcgcgcagaacgctttcaaacacatacgcgtccaccatggaaagctcatcgatgaccactgcgtcacactccagcggattgcgctcgtttctctggaacaccgggtcatcgttgtcgtcccagtccacctgtaacatgcggtgaatggtcttcgcctccacgcccgtcagctcggacatgcgcttcgccgcgcgccccgtcggcgccgccagaaataccgtctcgcctttttccatcaaaatgcggataatcgcgttcagcgtcgtcgttttgcctgtgcccgggccacccgtcaaaatcaaaagacccttttccagcgccgcgcggatcgcatccttctgcaattcggcgtactcgatgccttctgtgcgctcgatttccgcaatctcccggtcgatgcccgtaatggattccggcgggtagcgcagcatcatatggatgcggtcggcgcagtacacctcgctgcggtgctgcttcggcaaaaacacgaagtcacgcccgttaaaattctcgttcaccgcctcaaacgtctggcacagctcaagtaaagcctcctgcgcactctccggcggcacgcccaaaagcttcgcggccgccgcgcacagtttatccgccggcaggcacgtgtgcccgttattcaaattgtgccgcagcacatacagcacgcccgccttcacgcgctccttgttgtcgcggtcatactccagcgactccgccagctgatccgccaccgcaaacgaaatgccgatcttatcgctgcacagccggtacgggtcttcctgaatgcacgccacagagtcctgcccgtacaccttccacaccttcacggtgtcctccgggcgcacgccaaagctgccgaggaatgccatcaaatcgcggataccgttcacgcgctgcatctcctcggagatttctttcgcctttttcagcgtgatgcccttcacggttgcaagccgcgccggatcttcctcgatcaccttaatggattcatcgccgaacgcttctataattcgccccgccagcgcgccgccgatgcccttcaccgcgccgctcgaaaggtatttcagcatcgccgccgtgtccgccggacgggagcgctcaaacgcctgtgcgcggaactgctgcccgaacgtcgcgtgcgatgtccacgtgccatacaggtgcagccgctcccccacactcacatacgggaacgtccccaccaccgtgatgagctcttcgccgcaatcgacctccaacaccgtgtactggttgctgtcgttgtggtagacgatattttccacgctgccttccatttccagcagcccgttttcctgcggcatcggttgcgcctccttgatttatcatcaaaacaaatccttttgggtttgttttatttcacttttcgcgcaagcgaaaaatttcacaatacgtaagtattatttcacattcggcaaagccgaatatttcactgaaacattactgccttcattacttaaatttctacgtttctattatagaacattctttcgtgtttgaaaagccccaatctccgcaaacgggtatttttgcacaagtctgcggataatcgcgtcgatctccgggtcgtttgtcggattcaggcacacaatgcggcacatgccgtataaatccagccacttcacgcgctccaaaacactgcgcacaatatactctgcgtcgtccgcgcggcgaatcgtcgcatacaccgtaaacggcagcgcatcctccagcattttcgaacgtgtcacgcgcaggcaaacgctccgcacagcaaataaaaagatacacagcgtaaacgcgcacaccaaagcaatcccgataggctccataaaaaacacctccgtgccagtctatgacgcgaaggtgatttcggttcttattctattttgcgcaaattaaagcacggcagccttcagagcctcgaccttgtcggtcttctcccactgcacgccgagctcctcgcggcccatgtggccgtaagcggcgagctgacggtaaatcgggcggcgcaggtcgaggttgcggatgatcgcgttcgggcgcaggtcaaagaccttctgcacagcctcggcaagcttggaatcctccaccgtgccggtgccgaatgtatcgaccataacggaaaccgggtgtgcaacaccgatggcgtatgcaagctgcacctcgcacttctttgcaaagcccgcagctacaatgttctttgcaacataacgtgccgcgtatgcagcggaacggtcaaccttcgtcgggtccttgccggagaatgcaccgccgccgtgacgacctacgccgccgtacgtatcgacgatgatctttctgccggtcagaccgctgtcacccaccgggccgccgatgacaaaacggccggtcgggtttacataatacttcgtgttctcatcgatgagctccgccggaacgatcggcttcacaacatattcgatcatatccttgcgaatctgctccagagagacagcctcgctgtgctgcgtggaaataacgatggtgtcgatgcgcttcaccgtgtcgccgtcgtattccgccgtcacctgcgtcttgccgtccgggcggaggtagtcaagcgtgccgtccttgcggacttttgccagctgctttgcaagcttatgcgccaaagagatggtcagcggcatcagctccggggtctcatcgcaggcatagccgaacatcataccctggtcgcccgcgccgatgagatcgtcctggtcagcggcgccgtttttcgtctcaagggattcgttcacgcccattgcaatgtccggggactgcatgtcaatggaggtcagcaccgcgcaggtcgcaccattgaagcccgcatccggagaatcgtaaccgatctctttgatgactttacgcgcaatcgcatcgatgtccacatagcactcggtggaaatctcgcccatcacgtgcaccataccggtcgtcgccgtcacttcgcaagctacatgcgcggtcgggtctttcgccatgatatcgtcgagaattgcatcggaaatctggtcgcaaaccttgtccgggtggccttcggtcacggattcagatgtaaaaagatgtttgttgttcatgttttgctcctttactcttttcactcacagcccccacaaggaattttcggaaaaaaagaaccgctcacaaagatgagcggttcaaaatcctcatctttcggcattgccatgccgcaggaattagcaccttgcaaaatgcaggttgccggacatcaaagggcctgttccctccgtcactcttgataagggcatattcatttttgactgtaaaaaagtataacacagtttttcgcaaatagcaagggaaaaaaccgcagaaaatcccggttttataccgccaaattccggcatatcatacgactttgccgttgatgaccggctccagctttttatataccagaatcgtgataaccgcactgatgagccccttgcagaacgtaaacggcaagttaaagatcaaaagcgcctgccacaactcctgcacggacggattgattgcctgatacatgcccataatggcctccatcggcatcacattcgtgtagatcgggtaaatgatgaacagattcgagaagaatcccagcactgccatcaaaagcgcgccaacaacagagcccacaatcgcgccgccgtaattgcggtggtggcggtaaatcaaccccgccggcaccacaaacgcagaaccgataatgaagttcgagagctcacccacaccgccggtaatggtctgcgaaagcagcacaaggtttttcacaaagcaaacggcaacgccgctcaccgggccaagcgtaaacgccgcgatcagtgccggcagctcggaaaagtcgagcgaaataaagctcggcataaacggcagctggaagtgtaaaaacatcaaaacggtcgcaatcgccgccagtacgccggtcattgcaattttacgaatattcacattggaagtttttgcagtatttacggtcataaatgtcagaacctttctgtatgaatatcaggcagcgcaaggaaattcactcgcgcttgcattttccctttacgggaaaacacaaatccgcgcagcgccgcctttagaatgccgcataagccatgcgcattcccaacttatactatgtcaatacagaaacgggggtaagaatcaaaaaagcaccccacgaaaactcgcggggtgccgaaatccttttgattcacgtttcttctatcatccggactataccgtcggctccggaatcacaccggatcagcgcaaaactgcggtcgcgggcttatgccaaaggcatttaccgccggtgaggaatcacacctcgccccgaagaaaatgatgagattttagtttgagcaaaaattactcgttgatacccgtaacaacgccggaaccaacagttctgccgccttcacggatagcgaagcgaagaccctcttcgatagcgatcggggtgatcagctcaacgtccatgacaacgttatcgccaggcatgcacatctcggtgccttccggcagagagataacgcccgtaacgtcggtggtacggaaatagaactgcggacgatagttgttgaagaacggggtatgacggccgccttcgtccttggtcagaacgtaaacctgacccttgaacttggtgtgcgggtgaatcgtgcccggcttggacagaacctggccgcgctcgatgtcggttctctggataccacggagcagaacgccgatgttgtcgccagcctcagcaaagtcgaggagcttgcggaacatttcgatgcccgtaacaacggactttcttctctcgtcggtgagaccgatgatttcgacttcgtcggacatcttcagaatgccacgctcaactctaccggtagcaacagtgccacggccggtgatggtgaagacgtcctcaaccggcatcaggaacggctggtcagccttacgttccggggtcgggatgtagtcgtcaacagcatccatcaggtcgaggatgcacttgtactcaggagcgttgacgtccttggactcgctggtgagtgcgaggtaagcggaacccttgatgatcggggtgtcatcgcccgggaactcatactcgttcagcaggtcacggatctccatctcaacaagctcgaggagctcttcgtcgtcaacctggtcgcacttgttcatgaatacaacaatgtacggaacaccaacctgacgggagaggaggatgtgctcacgggtctgcggcatcgggccgtcagcagcggaaacgacgaggatagcgccgtccatctgtgcagcaccggtgatcatgttcttaacatagtcagcatggcccgggcagtcaacgtgagcgtagtgacgcttgtccgtctcatactcaacgtgagcggtgttgatcgtgataccacgctctctctcttccggagccttatcgatcatggagtaatcctcgaactgtgcctggcccttcagagcgagaaccttcgtgatagcagcagtaagagtagtcttaccatggtcaacgtgaccgattgtaccgatgtttacatggggcttatttctttcgaacttagcctttgccattggaattgcctccttttattcagtaaaataaccttttgagtttattaccattgtagcaacaaaccgcaaaaaaatcaagtagtatttcgctttattcagccttttttctggaagcgatgatcgtttcagaaacagacttcggaacttcagcgtagtgagagggctccatggtgtactgaccacggccctgtgtcttggaacgcatatccgttgcgtagccgaacatctcagacagcggaacttcgctggtgatctgcatagcacccggagtagcctcctgattctgcatgatgccgcgacgggagttgaggtcaccgataacgttgccgaggtattcctccggaacggtaacaacaaccttcatgatcggctccatgatgaccggatcagccttgcgcatagcatccttaaatgccatggaaccggcgatcttaaaggccatttcagaggagtcaacttcatgataggaaccatcatacagcgtgaccttcacgtcaacaacgttgtagcctgcaagtacaccggagagcattgcgccctggataccctggtcaacagccgggatatattccttcggaaccgtaccgccgacaactgcgttgacgaactcgtagcccttacccgggttcggctcaatacggatcttaacgtgaccgtactggcccttaccgccggactgacgagcgtacttcatatcggaatccgcattcttgcggatcgtctctttgtaagcaacctgcggcttaccgacgttagcctcaaccttaaactcacgcatcagacggtcaacaatgatctccagatggagctcacccatgccggcgatgatggtctggccggtttcttcatcggtatatgccttgaaggtcgggtcttcttctgcgagctttgcaagtgcaatgcccatcttttcctgaccggccttggtcttcggctcaatcgcaacacggataaccggctccgggaattccatggactcaaggatgatcgggtgcttttcgtcgcaaagggtatcaccggtggtggtgttcttcagaccgactgcagcagcgatgtcgcctgcgtaaaccatttccagatcctgtctgtggtttgcgtgcatctgaacaatacgaccgatacgctcggtgttatcctttgtggagttgtaaacggtggaaccagccgtaagcgtaccggagtacacacggaagaagcacagcttaccgacgaacgggtccgtagcaatcttaaatgcaagagcggagaacggctccgtatcggaagagtgacgaacgtcctcttcttcggtttccgggtttacgcccttaatagacggaacatccgtcggggccggcatgtaatcaacaatcgcgtccagaagcttctgaacacccttattcttataggaagtaccgcaggtaaccggaaccatcgtgttgttgatggtggacttgcggatgcaggtcttgatctcatcgatcgtgagctcttcacccatgagatacttctccatgagtgcgtcgtcctgctcggcgacatgctcgatcatctcggtgtgatacttctctgcgagctctttcatgtcttccggaatctcttcgcaacggatatccttgccgagatcatcatagtagacataagccttcatttccacgaggtcgatgaggcccttgaaggtatcttcagagccgatcggcagctggatcggtacagcgttgcacttcagtctctcgcgcatcatgttgacaacgcggtagaaatcagcgcccataatgtccatcttgttgacatacgccatacgcggaaccttgtattcctcagcctgacgccaaacggtctcagactgcggctcaacgccgccctttgcgcagaaaaccgttacggaaccatcgagaacacgcagggaacgctcaacttcaacggtgaagtcaacgtggcccggggtgtcgatgatgttgatacggttctggtgaccgtttctgtccggccagaagcacgtcgtagcagcggaagtgatcgtgatacctctctcctgctcctgtgccatccagtccatcgtagcggaaccgtcgtgggtctcgccgatcttgtagttgacgcctgtgtaataaaggatacgctcggtcgttgttgttttaccggcatcgatgtgcgccatgatgccgatatttcttgtaaattcaagtggtacctgacgggccatataatcctccttaatacgtttacaggtaaattaccatctgtaatgtgcgaaagccttgttggcttctgccatcttatgcgtatcgtcacgcttcttagcagcgccgccggcgccgttcagagcgtcaaggatctctccggccagtctctccttcatcgtcttttcagaacgaagtctggaatagctcgccatccagcgcagacccagggtctgacgtctctccggacgaacctcgatcggaacctgatagttcgcaccgccaacacggcgtgccttaacctccaggctcggcattacgttctccatagcctgctcgaaaacctccagagcgttcttgcccgtcttctcttcgacgatctcgaatgcttcgtaaacgatcttctgagctacgcccttcttaccatcatacatgatgttgttaatcaggcgtgtgaccagtttggaattatacataggatccggcaaaacatcgcgttttgctacattgcctcttcttggcatagtcttccctccttcacataatagtatgaattcatcggtactcgaaagcacaagctcccgccggctaagaaaaggtatttacgcacgataatcagtagcttatctattataaatacccttaaagcgaatttcgcttttccggtcaaaagttcattgtgtaacgattaaatttggctctttaaagaaattacttctttgcagcgccggccttcggtctcttagcgccgtacttggaacgagcctgcatacgctttgcaacaccctgcgcgtcaagcgtgccgcggatgatgtggtaacgtacaccaggaaggtccttaacacgaccgccacggatcataacaacgctatgctcctgcaggttgtgaccaacacccgggatgtaagcggagacttcgataccgttggaaagacggactctggcaatcttacgaagtgcggagttcggcttcttcggggtagcagtcttaacagcagtgcagacaccgcgcttctggggagaatcctgatcgatagcaattctcttcttggagttccaacccttcagcagtgccggcgcctttgccttcttctcggaaactgcgcgacctgtgtgaatcaactggttaaatgtgggcatattgcacctccttacacaatttctatatatgtcatgcgggtttatattgcccgcagaacatgcgcctatacaaaacagtatcctgtccgtacaaaaatcgcgcggacaggtctgttttatgcggtttcaaaggcggttctggcagaaattctcagatttcatgcccacaacacaccatttgacattatacaccgctcattattcgtttgtcaagccctcttctgcattctgtgcggaagttttttcctcaaagctgctcaaagcggctacggcctcctggcttaaagagctgctcggcgccgtcggcgcaatttcaacattggtgtagcagtccatgccggtgccggccggaatcagcttaccgatgatgacgttctccttcaggccaagcagcgggtctaccttgcccttgatggcggcgtcggtcagcacgcgtgtggtctcctggaaggaagcagcggaaaggaaggactcggtcgccagagatgccttcgtgataccgagcagcgtcggcgtgaatgtcgcctcgcgcaggccggtttcgccgtttgcaattcttgcggcgatcttctcgttttcaagaagcgtgtcgttcttatcgacgagcgcgccgacgagcagcggcgtgtcgcccgcgtcttcaatgcgcaccttgcgcatcatctgacgaacgataacttcgatgtgcttatcgttgatatcaacaccctgcatacggtaggtgcgctgcacttcctcaatgaggtaatcctgcaccgcctccgggccgctgatggcgagcacgtcgtgcgggttgacggagccttcggtcaagcgggtgcccttttcaaccacatcgccctcttttacgctgaggcgtgcgccgaacgggatgaggtagctgcgctggtcgccatcgccgcgaacgacaatgtggcggttcttcttgacctcttcaaagccgatcgtaccgccgatctctgcgatgattgcgagatgcttcggcttgcggctttcaaacagctcactgacacgcggaagaccctgcgtgatatcttctgcggatgcaacaccgccggtatggaacgtacgcatcgtcagctgggtacccggctcgccgatggactgtgcggcgatgataccaaccgcctcgccgaccgtgatcggctggccgtttgcaagggaggaaccgtagcacttcttgcacacgccgtgacgggtgcggcagttcaaaatagagcggatcttgatgtgcgtcgtgccgcggctgatgatgaggtcagcttcggcgtcgccaatcatcttatccttagagacgagcacgttgccattctcgtcacagtaatcgtcaagcaggtagcggcccacaatacgctccttaagcggctcaatggactcgttaccggatttgatttcgaacacttccagaccctcggtcgtaccgcagtcatcctgacgaacgataacatcctgagaaacgtcaaccagacgtctggtcagataaccggagtcagccgttctcagagccgtatcggcaaggcccttacgagcaccacgggaggaaatgaagtattccaaaatgttcaggccttcacggtagttcgccttgatcggaatttcgatcgtcttaccggacgtattcgcgatcagaccgcgcatgccggccagctgacggatctggttcatagaaccacgggcgccggagtctgccatcatgaagatcgggttgtaacggtcaaggccgtcctgcagggctttcgtaacgtcgttcgtcgccttttcccaagtcttcagaaccgcgctgtaacgctcgccgtcggagaggaagccgtcgcggaaatctgcggtaatctcgctgatctctgcctctgcctttgcaagaatctcctgcttctgcggcggaatagtcgcatcgcagacagcaacggtgattgcgccgatggtggaatacttgtagccctgtgccttaatggcatcgagcatttcgctcgtgattgccgtgccgtgctttttgatgcacttgtcgatgatcttgccgagctgcttcttaccgacgaggaaatcgacctcaaacttgaggatgttctccgggtcggtgcggtcaacaaagccgagatcctgcgggatcgggcggttgaagatcatgcggcccatcgtcgtatcgacaagacccgtatatgtctggccgttgtactccacggttcttctgaccttgatcttggagtgcagcgtgatatattttgcgtcatacgccatgaacgcttcgtccatgttgcggaataccttgccttcaccggtctctccgtccttatcgagcgtaaggtaataagaaccgagaaccatatcctgcgacgggaccgcaacagggctgccgtcggaaggctttaagaggttgtttgcagccagcatgaggaagcgtgcctctgcctgtgcttctgcggaaagcggcacatgcacagccatctggtcgccgtcgaagtccgcgttgaacgcggtgcagacgagcggatgcagcttaatggcgcggccctcaacgaggaccggctcaaacgcctgaatgcccagacggtgcagcgtaggtgcacggttcagcatgaccggatggttcttgatgacaatctccagtgcgtcccaaacctcgctcttcgcgcgctctacggcctttcttgcagccttgatgttgccggcggcaccggtctcgacaaggcgcttcataacaaacggtttaaagagctccagtgccatttccttcggcaggccgcactggtacattttcagctccgggccaacaacgataacggaacggccggaatagtcaacacgcttaccgagcaagttctgacggaagcggccctgcttgcccttcagcatatcggaaagggacttgagcgggcggttattcgggccggtgaccggtctgccgcggcggccgttgtcgatgagggcatcgacggcttcctgcagcatacgcttctcgttgcgcacgatgatgtccggcgcgccgagctcgatgagtctcttcagacggttgtttctgttgataactcgtctgtacaggtcgttcaggtcactcgttgcaaagcggccgccgtccaactgtacgagcggacggatatccggcgggataaccggcacggcatcgaggatcatccactccgggcggttgccggagatacggaaggattccacaacctcaagacgcttgagaatgtgcacgcgcttctgtccctgcgcggtttcgaggtcttttttgagctcttcgctgagcttttcgcagtcgatatcctcgagcagcttcttcacagcttcagcgcccatggacgcctcgaagtcgtcctcatatttttcacgcatgtcgcggtattccttttcggtgagcgtctgcatcttagagagctcacgaacggaacccggatccgtaacgatgtaaagtgcgaaatacagaaccttttccagtacgcgcggggaaaggtcaagaatcagacccatgcgggacgggatgcccttaaagtaccagatgtgcgaaaccggcgctgcaagctcaatgtgacccatgcgctcacggcgaaccttgctgcgcgtcacttcaacgccgcagcgctcgcagaccttacccttaaagcggatgcgcttatacttgccgcaatggcactcccagtcctttgtcggtccgaaaatgcgctcgcagtaaaggccgtcgcgctccggcttcaatgtacggtagttgatggtctcgggcttcgtgacctcaccgtacgaccaggagcgaatctgctcgggcgatgcaaggccgatctttattgattcaaaaacgttaaactccatatatgcgatcctttcctttcacccgaaattagaactcgtcgtcgatgccgtcaaacaaatcgttatcggagccttcaaactcatcatcgtcgccggtagagaagaagtcgtcctcttccccgtcttcgttctcgatggaatagccgtcgaaatcgccgtccgttgcgacgttttcttcatcaaagacctgatcgcccggggtgagacccacatcatcgtcatcgtcgaagctctggcgcaggtcaatctcctcgttgtccttatccagtaccttgatgtcgaggccgagtgcctgcagttccttgataagaacgcggaaggattccggaatgcccggcttcggcacgttctggcccttaacaatggcttcgtaggtctttacacggcccacaacgtcgtcggacttcaccgtcagaatctcctgcagggtgtaagccgcgccgtaagcctccaacgcccaaacttccatttcgccgaagcgctggccgccgaactgcgccttgccgcccaaaggctgctgggtaacgagggcatacggaccggtggaacgggcgtgaatcttatcgtcaacaagatgatggagcttgaggtagtacatgtagccaacggtaaccgggttatcgaaatactcgccggtacgaccgtcacgcagacggaacttgccgtcctcactcatgcccgccatgcggaagcactcgcggatatccgcttcgtgtgcgccgtcgaataccggggtcataatcttccagccgagtgcgtttgccgccatgccgaggtgaacctcgagaacctgtccgatattcatacgggacggaacgcccaacgggttcagaacgatgtcaagcggtgtaccgtccggcaggaacggcatctcttccatcggcaaaatgcgggaaacaacacccttgttaccgtggcggccggccatcttatcgccgacggagatctttctcttctgtgcgatatagcagcgcacgaccttgttgacgccggggctcagctcatcgcagttgtctctcgtgaagaccttaacgtccacaatggtgccgtactcgccgtgcggaacacggagggacgtatcgcgaacctcgcgggccttttcaccgaagatggcgcgcagcaggcgctcttcggcggtcagctcggtttcgcccttcggcgtgaccttaccaaccagaatatcgccggcgtgaacctccgcacccacacgaatgatgccgcggtcatcaaggtcgcgcagcagatcttcgttgacgttcgggatgtcgcgggtaatctcttccgcgccgagctttgtatctctggcttccatctcatactcttcgatatggatggaggtataaacgtcgtcgcgtacgattttctcgtttagcagaacggcgtcctcgtagttgtagccttcccaggtcatgaagccgatgagcgcgttcttgccaagcgcgatctcgccgttcttaatggccgggccgtccgccagaacatcgcccacttcaacgcggtcgccgcggttgacgatcgggacctggttgatgcaggtgctctggttggaacgcatgaactttgtgacgacatagtcgtcgatatcgccgttatcggtcgtcacgcgaatgaggtctgcactgacgctcttaacgacacctgcgcgttcgcacaggacgcagacgccggagtcgacgcctgctttatactccatgccggtaccgacgatcggagactcggtgcggagcagcggaactgcctgacgctgcatgttcgcgcccatcagagcacggttcgcgtcatcgttttcgaggaacgggatcatcgccgttgcaacggagaagaccatacgcggggaaatatccatgtaatcgacgcgggtcggctcaacctgaatgaactcgcccttgaaacgtgcgagaacgctgtcgtttgcaaaggtgttgtcttcattcagcttttcgtttgcctgcgcaacgatgaactcgtcttccacgtccgccgtcatgtaaacgacttcgttcgtaaccttgcccgtcgccttatcaatctttctgtacggcgcttcaatgaagccgtagtggttgattcttgcgaacgttgcaagataggagatcagaccgatgttctgaccttccggggattcgatcgggcacatgcggccgtagtgtgtgtagtgaacgtctcgaacctcgaagctcgcacggtcacgggaaaggccgcccgggcccaaagcggagagacggcgcttatgcgtcagctctgccagcgggttcgtctggtccatgaactgggacagcggagaagaaccgaagaattccttgatcgctgcaacgaccggacggatattgatgagagaatgcggtgtaagggattccatatcctgaccttgcagcgtcatgcgctcgcggatcacgcgctccaagcgggagaagccgatgcggaactggttctgcagcagctcgccgacggaacggatacggcggttgccgagctggtcgatatcgtccgtaaagccgagaccgacagcaaggcaggtcatgtagttgatggaggagaaaatatcatcaatgatgatgtggttcgggatcaactcgtcatgacgtgcggtgagctgctctttgagcttctcttcgtcgtcgccgcactcttcgagaatctcggagagcactgcgtagcgcacacgttcgttgatgccgcactctgcctctgcatcaaaggaaacgtattttgcgatatcgaccatgccgttcgagatgaccttcgtctccttgtcgtcctcaagggcaacccaggcggtggtcacaccggcgttgtcgatgtcttcggcaagcgtgcgggacacaacggtgcccgcctctgccatcacctcgccggtcgccgggttgacgatcgggcgggaaagctgacggccggtgattctgccggcaaggttcagcttcttattgtacttataacggccgactctggagaggtcgtagcgtctcgggtcgaagaacaggccgttcaaatggaactgcgcgctttcaaccgtgggcggctcgctcggacggagctttctgtacacctcaaagaggccttcctccatggtgtgcgtggtatccttatcgatggtcgcaaggatgcgctcgtcttcgccgaagtattccttgatctcttcgtcggtgccgagaccgagtgcgcggatgaacgcggtcatcggaagctttctgtttttatcgatacgcacgtagagtacgtcgttcacatcgttttcgtactccagccatgcgccgcggttcggaatgacggtggaagagaaaagctgtttgcctgttttatcgtactccatcttataatagacgcccggagaacgaacaagctgggaaacgataacacgttctgcgccgttgatcacaaaggtgccggacggtgtcatcagcgggaaatcgcccatgaagacttcagattccttgatctcgcccgtttccttgttgagaaggcgtgcagtgacgcgcagggctgccgcataggtagcatcgcgctctttgcattccgttaccgtgtaattgggtttttcgtcgagcttgtagttcacgaagtccagaaccagatttccgttgaaatccgtaatgccggagacgtcgtcaaaaacttccctcagaccttccttcaggaaccagtcgtaggaatttttctgaatctcgatcaggttcggcatatcgagaacttcattgatgtgcgagaagctcatgcgtgtgttcttgccaagctgtaccggcttaacattcaccattgactcaaccactccattcttagtatttgacccgtgtttttaagcaaaatcacttaaaaacggcggaaagaatatccgttcatgtgaattttatagattatgcttgattatttttcggaactgtgttataatgcagatcagagaaagaaatggcatatctatccatgatgatacattgtaatatgatacaccgtatctgtggatttgtcaagccttttcccgaaatttttcgagttttattccctttttcttttctcaaattccaaagcagaataaattgaattttgacccgtatacccgatagcacatggaccttgtaaactgcaatcgggctttatttttatccgctgctaatcattttaatttgaggaggaacactgtatgaaaaagcatttcgcaaagcagattttcgccgctgcccttgcaatcagcttcgtgtgcgggctttcggcatgccgtgaacgcgaagaagagcaactcacgttaaagccggtgatttatctttatccggaagaaaaaacggacatctcggttacgctcgcgtacgacggaacgctcacttgcacctacccgaattacaaaaccggctggcatgtttcggcgaaacctgacggtactctgacggacgaggacggccaaacgtataactacctgtactgggaaggcacggacagcgcggaatacgatctttcccacggcttctgcgtagcgggcagcgacaccgccgctttcctcgaaaatgccttgcgcgacctcggactcacccgcaaagaagcgaatgaattcatcgtgtactggcttccccagatgcaggaaaatccctataatctcatcgcgtttcagtccgactgctatacgcaggtggcgcagctggatatctcccccgcgcccgacacgctccttcgggtcttcatggcgtggaaaccgcttgaagagaaagtcgacattcccgcgcaaacgctcaccgctcccgcccgcgacggcttcacagcggtggaatggggcggcagccgcataaactgaaccgtagctcttgcccgtgcagagtctcacagcgttcataccgcttaaaaacacgcaaaaccttcccggtttccaaacggaaacgaaaccgggaaggtttttgttttgtttatgttgaattttggatgccgaagaaattaagttaaaaagcgaaagccactttcaaaacgaatgattgcgttttaagtatgtacttgcgtgtacttttacgcggattcgcttacgtttctgcctctttcccctcgcctttttcgtccgcctcggtatcctcgcaggcacagatggacgcgaacgtgtaggactccagcttattgcgcacaagctgcgagacctcaccgtagatgtgatgcaaacggcacgaggtgcgctggcagctgtacgcatcgccctggcagcgggaaatcatatacggcccctccaccgcctcgatcacgctgcgcagcgtgatctccttcggcggctttgcaagctcatagccgccctttgcgcccttatacgagcgcacgatgccgtccgaaacgagcgtgcgcagaatcttcagcgtaaagcgcagcgtgacgcttgtgcgctccgagatcgttttggcatctgcgcgcccggggttcacggccaaaaattccacgatgcggactgcgtagtccgcttccagtgtcatgtgcatggtatgtgcctatcctttcgggatcaatccagaaaatccttcagcttcttgctgcggctcgggtgacggagctttctgagcgcctttgcttcaatctggcggatacgctcacgggtgacattgaattccttgcccacttcctcgagcgtgcggcttctgccgtcctcaaggccgaagcgcaggcgcagcaccttttcctcacgcggggtgagggaatcgagcacatcgccgagcgtttcgcgcagcagcgtatgggaagcggcatctgccggggccggtgcgtcgtcatccgggataaagtcgccgaggtggctgtcctcttcctcgccgatcggcgtttcaagggagacaggctcctgcgcgacgcgcatgatctcgcgcactttatcaaccggcatatcgagctcgtcggagatttcctccgcggtcggctcgtggccgctcgtgtggagcagctggctggagaccttcttcaccttattgatggtctccaccatgtgcaccgggatacggatggtgcgggcctggtcggcgatggcgcgcgtgatggcctgacgaatccaccacgttgcgtaggtggagaacttgaatccctttgtataatcgaacttttcaacagccttgatgaggccgagattgccctcctgaatgaggtcaaggaactgcatgccacggccgagatagcgcttcgcgatgctgacgacaagacgcaggttcgcttcggaaaggcgcttcttcgcggcttcgtcgccgtccttgatggcgatggcaaggcgcacttcttcttcggaggaaagcagcggcacgcggccgatctctttcaggtaaactttgaccgggtcatcgatggcgacgccttccatgcccatgccggcatcaaaatcgtccgtatctgcgccggatactttggaaaggtcgatgtcatcaatctggatatcgctgaagtcatcgataatctcaatgccgtgcgattccagtgtatcatagaatttttcaatgtgctccgggtcgaaatccaattcgccgatggcgtcgaggatctcctttgtggtgagctggcctttgcttttgccgagctcaatcagatcgcggatcacggttttcttatcgggtgctgccatagtttatcatacctttcctgtgttttcccttattccctcggcagcgtctgcacgctgcctttttatctccattctgttttaaagcataacgttcctattttttctgtttgcgcagtgcatcgagctgcgcctgcaggtcggcggggttcgcaccacgcaccttatcggtatcggtcaacgcgccttcgctcaaaatgatctgcacgtattcttccgcgtctttggcggtgatgccggcgttttcctgcacaatcttcgcaaggcggcccatttcgtccggcgtacattccgccgaaaagtctgtaatctgcggtgatgtgaccgtttcttcgtttataatcttgcccaggaggctctgatataaccggcgattgaacgccgtcacgaatttttcgggcggcacgcggcggttcaggctctgtgcgaggtcattattgtggaaaaggcacgcgatgagccgctcttcggcgttggccacgcggacatagcggcgcttttcggggtttacggtatcgcgccgcgcggaaagctgctccgtcatgtccctttgctgctgccgctgcgccgcacgcgcttttttgcgcacggaaacggacatctgctgcaaaatggcgtttttgtcaacattcaattcctgcgaaaggcgactgacgtacacgtcgcgctcaatggcgttttcaaggcccgccagcagctctacggcggccatcaggtattgaatacgcccgttttcgttgcttaaatcatacccgcttttcagctttgcaaggcggtattccacatcgttgccgctttgctcaatgagcctacggaaacgcgccgcgccttcatcaccgcatgcgttgatgaactcgtccgggtctttgttgccgggcacggccatgacgcgcaccaaaagccctgcgccgcgcagaatgggaatggcgcgctgtgcggccttttgaccggcttcgtcggaatcgtagcaaatgacgacctctttcgcatagcgggcaatgatgcgcgcctgctctgcggtgagtgccgtgccgagcgacgcaatggcgttttcaatgcccgctttgtgcagcgagatgacgtccatatagccttcagccaaaatgatgcggtcgttttcgagcgcgttttttgcaaaattcatcgcgaaaagaccgctgctcttgtggtagaccggggtatccgatgtatttatgtacttcggcttttcgtttgtcaaaatgcgcccgccgaacgcgaccacgttgccgcgcagatcaatgataggaaacatgacgcgtgcgtggaaacgatccatcgcgcggccggagcgcgtctccaccgcgacgttcgccgcaatcatctcgcgctcggaatagcccttggagcgcaggtgattaacgagcgcaaagcggctttccggcgcccagccgagcccgaaatggcggatcattttcatgggcaggcgtctgcgcgcgaaataatcaagccccggcttaccctccgggcttaaaagcgcgctgtggaaaaagcgggcggattcgcggttgatttccagcacgcgctgacgcaggcggctcatggaatcgtccacgccctgctccggcatttgcagccccacgcggtccgcgagcattttcacggcctcgatgtaatcgagattttcaatcttacggatgaatgtgatgacatcgccgcccgcgccgcagccgaaacagtaaaacgagttattctccgggtagacgttgaaggacggtgatttttcgttgtggaagggacacagtcccaccatgtttttgccgcgccgctttaggttgacatacgaggaaacgatgtctgtaatgtcgcagcgcgattttaagtcctgcataaaggactccggcaacggcattccaccgccccctttcgtgaccgccggcgcgatgccgttgggattacgggcaaagctcggagcaaaacgccctgatttttgccctcatagtattatatgcgccgcaaacggcgaaattacttcttttattcttcaaattcaaaaaatttttttccgtcttctgtcacatcgacctgcccatttgtggcatccgcaagttttttgcggaatgtgccgagcagctcgggcgccaaatgaaatttgacggtgactttttcctcaaagaccgtatcgtccgtcacgccgccgcattccggaacaagcgatgcaacgcggccgtaccggccgtaatcgcaggtgagcgacaacagcaggcactcgcgcatggtaatgatctgtgccgcctgcagggcgatggacgcggtgtgcgaatacgcgcgaacgagaccgccgcccccgagcagaatgccgccgaaatagcgcgtggcaaccgtgacgacatccgtaacgccgcttttgcgcaggacatccagcaccggcataccggccgtgccctgcggctcgccgtcatccgaaaagcgcatggtgccgtcgcgcaggatatacgcatagacgttgtgactggcatcccagtgctcggattttttggacgtgatgaaatcgagcgcctcctgctcggtctgcaccgggcaggcataaccgatgaaacgcgatcgcttttccacaaactggtcctgcgcgtttttccgcacggttttgtactctgccatttttaccgctcccctctgttttgaaacgaacgcgatttgcctttggagaaaaaatgggcgttgcccgaaagagcaccgccctgaacgatccatataaatttacttcgtgataccgtagcgcttgttgaacatatcaacacgaccgcttgtatcaaccagcttctgcttacccgtaaagaacggatggcacttggagcaaatttcaacgcggatgtccttctttgtggaacgcgtgtgaatcacattgccgcatgcgcaggtaatggtcgtttcctggtagtccggatgtatattcttcatatctgtcacctctttcggttgatctgcggttagtcggttaacagcgaagttaacacataaacatagcgctaattatgttagcacaaaaaattctaaaatgcaaggtctttttcaaaaaaacagaaaacttttttctttttcttcccgaaagcatccgtttttttcgttaggcgccgatgtagcgaaggtattcttcgaggcaaaaggagagtctgcggatggcggcggcgtgctctgtgccgacatagcgcaggacaagatcattgcgtttaattccggtttcatcctcttttccggctggatagcggaacacaaagccgtaatgcgccatgtttctttgcagccagccgtaggtatccgttgtcgaaaacgttgcggggtcgtcctgcacggtaacgcacaggccgctttgcaggtcgcttgtgccgggcgcggacacggtggattttgcgtcttcgcgcgccataatcttggtggaacctgccgcgataaggcgctcgacttcggcgttataaagcgattcctgctctgcataggacacatagccgccggaaaacttgagcgtgacaccgtctgcctttgcggcatcgcacagtgcggtgagtgccggcacaatgcgggcatcgaccgtgacgctgtcaaactcggcggtctcctcgggggcgaaacccgcgtccgcagggtggtcttcgttgatgacgaacagattcacgctgtcctcgagcacgggcaggtcgttttcctccgtgcttgcagcgggggacgcggtgggcggtacggtggcctgcggcagggaatcctccggatcttcgggcgggaaaagcaccggcaaaccccacatgacgaacagtgcaagcgccatgaaagcggcggcgcagataagcagaatgcccgtccaacgctttaggttcataatgcgctccaaatgcagcggacgcggcttttggatggggctgtatttttttcgtttccgcacggtgctctccccctttcttccggtatcttttactattatatcggatgacggaaaaaaagcaagtcgaattcctttacaacagaaaaacgcccgagccgtgaagcccgggcgctgtgtgtttcagttaacgctattttttgaagaattacttctttttgcttttacgagagggaatctcggtggtttccgggtctacctttcccatttcggaagctgcactgctaagaccgtcctcgccgctgctgagcttgccgttattgacgatgaggttcgtgacaatgccgacgatgagggcaacagccaaagacgtgatgttcagcagagcgccgccggtgatgctgttcgtgccaaagccgaagtacaaaccgccgatgccgcagacgaggatggagctgacaacgaacaggttcttactgttgccgagatcaacacggtggagcatctggagaccggaaacggcgatgaagccgtagagcgcgatgcacgcgccgcccatgacgcacttcggaatggagttaatgagcacgacgaacggagtgaagaaggaaagcaccatgcagccgagtgccgcggtgaggatggaaacgatggaagcgttgccggtgatggcgatgcagccgatggactcgccgtaggtggtgtttgcacagccgccgaagaacgcgcccacaatggagccgaggccgtcgccgatgagggtcttatcgagacccgggtctgcgatgaggtcgcggttgacaacggtgctgaggttcttatggtcagcgatgtgctgtgcgagctcgacgacgccgatcgggatgtagatcatggcgatgttgccgatggcagccgcatcaagcggatactggccgttcgtctcgattgctttgaggaagaagaacttcggataatcgacgatgctggtgatgctgaatgtgccgaatgcatcgatgaacggctggaaggaaaggagcttgaggctctctgtgcccgttgccatgccgatgaatgtaaagacgagtgcaagcgcatagcccgcgccgatgccgacgataaacgggatgagcttgacggttttggagcccttaacggacgcaacgacaatcatgaagaaggtgaagatgccgcagatgatggcagcccagttgtaggtctcgccgtatacgacagctgcagcgccgttgcccatgatccagcttgttgccgtgccggagagggacagaccgatgagcgcgacgatcggcccgatgataacggacggcatcagcttattgacccaaccggagccgacgaccttgatgacaagaccgatgatgacgtaaacaagacctgcgaacgcaacgccgatgagcatgccccagtagccgtaattctgaccgattgtagcagcatacgcgccgaggaaggtgaacgaggagccgaggaataccgggcttctgcgcttggtgcagaacaggtatacgatggtgccgatgcccgcgccgaacagtgcggctgcggcgtctgcctgcaggccatagctggtgacaagcagcggtacgagcagcgtagccgccatgatggcgatcatctgctggaatgcgaagaccagtgttttgctgaacttcggcttatcttcgatgccgtaaatcaacttcatgaaatcatttcctttcttccgaaccgtggtttcatttcttaccccaaaacacgttctcttctcccctatgcttttccgagcataaagaaaagctctgcctgtaaaatgggcagagcttgagccttgtcagcacgccgtctgtaaagacgtattaagagtcaatcttgccaatatcacagtatcggggttaaagatcgtatttcattttctaacactaaactatagcacaacattcgacgaaagtcaacgtaattcgcgcacttgtgaatagtttgtgaatattcatcaaaaaaggcagcacaagacagaaaaagctctccgaaccatgcgaagagcttttacgtttacaaggattactggtttttattcggtttatagctgactgtgccgcacaggcgatcgcctgcgtcgccggctgcggtgggaatgtagccgttctcgttcagcgggccgggtgcgtagtttgccgcgtagattttgacatccgggtgcttttcatacagcagcttgatgcctacctcggacgcgaaaatgcacatgaacttgatgttcttgcagcctgcgtcctttaaaaactggatggctgcatctgcgctgccgcctgttgcaagcgccggatcaacaacgacgacagggccgtctgcggtatcgaccgggagcttaaagtaatacgtcatcggctttagggtttcctcgtcgcggtaaaggccgatgtggccgacctttgccgtgggcgaaagctcacgcaggccgtctaccatgccgagaccggcgcgcagaatcggaacgatggtgaaatcctctgcaagcaccggggtaatgatcttctgcagcggcgcctggacctccacgtccttcgttttgagctccttgagtgtctcatagcccataagcatggcaagctctttgacgagttcgctgaattccttggtgccggtgttaacgtcgcacaggtggctgaccttgtgcttgatgagcgggtggttgaaaaccgtaagattggaaagatatgcttccatgtttgaccttccttagtccgtaagacggcgcaccgccttgtttcgtttattttcaaagagtatcatagcacacgctttgacaaaaatcaaccgaaagagacgcgtcttgacggaaaagcgccgaaatgctacaataaatcaaagagtttaaaaaaggattgacaagcatgcctatgaagctgaaagcccagctgatggacgatgttaccgtaaagcgcgctttggcgcggctttcttatgaaatcatcgaaaaaagccgcgaccttgaaaacgtggtgctcatcggcatcaaaacgcgcggtgtgccgattgcggagcagattgcggcgaacattgagacgcacaccggtgtaaaggtgcaaacctgcacactggatattacattctaccgtgacgacctgacaaagcggcacgacctgccgactgtgaacacgcagacgcttccggtcgacctcaacgacaaggaagtcattttggtggacgacgtgctgtttacgggccgcacggtgcgcgcggcgatcgacgcggtgttccgtttcgggcggccggcgcgcattcggctggtcgttttggtcgaccgcggtcaccgcgagctgcccattcgccctgattttgtgggcaagaatatccccacctctctacgcgagatcatcgccgtgcatttggaagctgtggacggcaagacgaacgtggaaatctacgagcaggacgagaacgaaccggaaatctacgggcaatgacccgcttttagtgcaaaaatcaaattaaaagaaggtataaacatggctgtaattttggcaagcagttgccttttgggctgcgaatgccgctataagggcgacggctgcaagtgcgatgcgctcattaagcttgcagaaagcaacacgatcatcggcgtatgtcccgaacagatgggcggcctgcccacgccccgcgacccggcggagcggcagggtgacaaggtgatctcctgtgcaggcaaggacgtgacgaaggcgtacacaaaaggcgcagagacggcgctgtactttgcgaagctgaaccacgtggattttgccgtgatgaaggcgaaaagtccgtcctgcggcaagggactcatttacgatggcacgtttacgggcaacaagattcccggcaacggtgtaaccgtggagcttctgaacgcgaacggcatcccggtgtttacagaggacgaactggatcagctgccgctgtaaagcgaaatatcttaacacgaagaattgggcctgctgcgctttgcggcgggctttttgcttgaagatataaagaaaaaccgtacgtaaagttttactgctttacgtacggtttttttgaattttatgtaatgctattttgctttacagcttacttctcgtcgaagaacgccttgaagcccttgtaggccatgtagacatcgagcttggagacaacctcaaacggtgcgtgcatggagagcaccggcacaccgatgtcgagcacgtcgacattgaggttcgcgatgaactttgcgaccgtgccgccgccgccctgatcgaccttgccgagctcgccgatctgccaaagcacgcctgcatcgtcaaacgtgcggcggattttggcgacgaactctgcgttcgcgtcggacgtaccgcccttgccgtgtgcgccggtgtacttggctatgcccagaccgccattgatgtaggtggagttctgtgcctcgtaaacggaagcataatgcggatcatatgccgcggtgacgtcggcggaaatgcaggtggacttggagagcacgtggcgcggctcttcgccctctgcctgcgcgaggtcagcgatgaagtaacgcatgtactcggagttgaggcccgtgttgccgtcgctgccggtctcttccttatcggtgagcacagtgacgacggtctgcaccgggttcttgcagttgaggatagcttcaagtgccgggtatgcgcaaacgcggtcatcgtggccgtaagcgccgacgaggctgcggtcaaagccgatatccaccgccttgaacgccgggacgaactcgatctctgcggagatgaggtcggcttctacgatgccgtacttctcgtttaagagacgcatgatgttcagcttatatgcatccttagcctcctcgtcgcgaaccgggcggctgccgatgaggatgttaaggtcttcgcctgtaaaggcagtacccagcggctttgtagcctgatcctgaccgaggtgcggcaaaatatctgtgatggtgaactgcggatctcccgcttcttcaccgatgcagaccttgatgaccgtgccgtcgctcttcacgacaacgccgtgcatggcgagcggaatcgccgtccactggtactttttgatgccgccgtagtagtgcgttttgaggtacgccatctcggaggattcataaagcgggatgggctttaagtcgagacgcgggttatcgatgtgtgctgcggcaatgcgaacgccgtttttgcagccctctttacccatgatggcaaggcaaattgctttaccgcgattgttgtaatacactttgtcgcccgccgcatacttgtgcttcgggtcgaacggcacaaagccgtgcttttctgcagccgcgaccgcgtactcaacggattcgcgctcggttttggcgctgtttaaaaatgccttgtagccttcgcagaacttatctgctttttcgatcttctcatctgtgaccttgaaaaagccgttcttgcgcgggttgaggagcatttcggacagctcttttgcggatttttccgctgcttttttagccattttcaattcccccatacaatttttcgtaagtttctttatactgaaggactttctggacgtaaagacgcgtttcttcaaacggaatttcttttaaggtcactccgtcttcggaatatgcggggtccgaaagccacgacgtaacgtttcccatgcctgcattgtaggcgcagaccgctgtggcgaggttgtcgtactcgtttaaaagcacgcgcagcagcgcacagccgtatttgatgctgatttcggggtcgagcaaagcgcttgcgtcatattccccgccgatatgcgtttgcatccagtcaaacgtttcgggcatcatctgcataagcccgagcgcgccgaccggagactccgcctcggggtcgaaatcgctttccgccttgatgacggcatagacaaggctttgcggcaagtcgtactccttcgcttcttttttgacgatggatccgtacttgcgcgggtaaagcatgtggtctacatcgggatgcagcctttgcactgcgaaaacaacgagcacggcagctgcaatgccggcgataagaatccatggccacaagggcttctttttggacttttttaaatgtttgcttctcttattcaatcggattcaccggggtgtgcgcagccaagcactgcgagcatattatccatatcgtccgccgaaacagcgacggtgttatcgagtgtgtaatcggagcggtcgatgtaaaaatcgtcgctctgctgggcgtgcatgcgcgtcagggcctcctgctccgtgagaccgtcgcggcggcagatgcgcccaaggcgcacggtttcatccgcaagaacggagaccacacggcggcaaaggcgatctgcaccggcttcaaacagcgtcggagcgtcgagcacgatgacctttgcatctttatatgcggcaatctcctttttgagacgcgctaagatcacgggatgcgtgatggcgttcagcttcgctttgccctcttcgcttgcaaacgcgaggtttgcgagacgacggcggtctaacgtgccgtcttcttttataatagcacggccgaacgcattttgcaactccgtaagacatgttcctgcataaagagacggatcgtgcgtaacggcgtcgcagtcgatgatgacgcagccgcgcgccttaagctgctttgcgaccgtcgatttgcccgcgccggtctggcccgtaaggccgatgacgagctgctcgttcggcgttacgatgcggaacgcacaagcgcgaatgagacggttataaaccgcaaggcctacgccgcttttgcgcggcatacgggcgtaaacggtctttgcgccgatctcatcgaggtgatggagcgacgtgaaaagcccgtgcgcctgcgaaagggaatctgcggcgctgccgtagggcacgcaccggtttttgaggtacggcacgtcttcgttaaagcaaagtacagctgcttcggagtgcgtatgcaaaaacgcggcgtagtcttcggcggaagcgtccaccatgtagacatccgctttcggcgcgtagtgcttgtatttcatgccgggcgaggcgaccttggcgttttccgcgggcttttccagcacggcgcggtccacgtctaccctgccgagcacgcggcgcagctgctccacggaaatgccgcccgggcgcagcacacgcggtatctcggtgacgacggtgataacggtggactccacgccgacctcgcagtcgccgccgttcacgatgccgtctacgcggcccatgagatcatcgcacacatgcgggaacgatgtggggctgggcagaccggagagattcgcggacggcgcggcaagcggcacgcctgcggcgttaatgatcgcccgcgcggtgggatcggacggcatgcggacggcaaccgtatcgagaccgccggtcgtctgcatcggcacaagcggcgattttttcatgatgatggtaagcgggcccggccaaaaggcatctgcaagctttttggcggcttcgggaatctcttcgacaagcgcaggcaattctttgatatccgcgatatgcacgatgagcggattatccgacgggcgacccttcactttgtagatctgtgcggagacggtagggtccagcgcattgccggcgaggccgtagacggtctctgtggggatggcgacaagaccgccgcggcgcagaatcttccccgcttcttttatatcctgttcgtttttttcatccaataatcgcgtatccatgttcatccgttctccatgctctcttttaatttttcggcgcggtctgcggcgatgagtgcgtcaatgatttcatcgaggtcaccgtttaagacgtcgaacaggcggtagattgtcaggcctatgcggtgatcggtcacgcgcagctgcgggtagttgtaggtacggatgcgctccgaacggtcgccggtgccgacctgacttttgcggtttgcggcaatctcggcgttttgcgccgccaccttagcgtctaacagtcgggcacgcaggacgcgcagggctttatctttgtttttgtactggctgcgctcgtcctgacactcgacgaccgtgccggtgggcaggtgcgtaacacggatggcagacgacgttttgttgatgtgctgcccgcccgcgccgctggagcggaatgtatcaatctttaaatctttcgggtcgatctcgagctcgacctcatcggcttccggcaaaacggcgaccgtagcggtgcttgtgtggatgcggccctgcgtttccgtttccggcacgcgctgcacgcggtgcacgccgctttcaaattttaatctggaatacgcgccgtcaccgtcgattgtgaagctgacttccttaaagccgccaagctccgtttcattcaggctgacgatctccgttttccagccgcgcttttcggcgtacatgttgtacatgcggtaaaggttataggcgaacagtgccgcttcctcgccgcctgcgccgccgcggatttccacgataacactgcggtcgtcgttggggtcgcgaggcaataataaaattttgagttcttccgagatgctttcgatatcgcttttggcggcgctcatctcgtcgctcgccatttggcgcagctctttatcggcttcggagtcgtttaaaatcgcttcggcatcctcgagcgatgcttcggccttttttaaggcgcggtatttctccacgatgggttcgatttctttgtgctccttcatgaggtcgcggtagagattgcggtctgccgcaacggcgggatcatagagcttcatattaagctcttcatatcggttttcaaaaaccgagagattttcaaacatagcaaagcttcctttcagacagatagtaaaatgaaacggtctgagaggcgctactgctcgctgccggcactttcgcgcacgatcttgcgaatgttcttttcacacttgtggcggggcaccatgacttctctgccgcagccggtgcagcggattttaaaatccgcgccgatgcgcagcacttcaaacacgtttgtcccgcaggggtgcggctttttcatttgtaatttgtcgcctacccgaacatccatggtacagcctcctttatcgtgtattgggcgcgaatgctcccttgaaaattcagtatagcacaatgctgtattgatgtcaaagcaaaagaccgcctgcgcgggactttcccttgcagacggccttttcggtttctattttattccaaacgctttgtgaaacgcttttacgctgcgatgtgaatgccgctcttcttcagcgcgaaactgagagcagtcgctacgccgtaagccgccgcaacggagacgatgtccttgacgagatacggcacggaggccacaaggaacgccgcccacgggccgttgccggagataatgccgaactgaatcgtgccgcacagatggcaagccgcaagacccgcaacaccgagtacaatggcgagcacacggtgcggcatttttgtgccgagaccgcacagcgcagccatgggcagaaagccgtagatgtagccgcccgcgagaccgacaagcgaaccgaagccgccggagaagtttgcaaacaccggcagaccgacagcgccgagcacgatatagacgagcacggcgagcgtgccgcgcttacagccgagtgcatagccgcacagggcgaccgcgaaggtctgtaaggtgaccgggatgccgctcggcagcgggaacgaaatctgtgacaaaacggcgagcacggcggcgaatacgccgaccatgacgatattggtgattttctctctgttgctgttcatgttatttacccctattcatttcggaatacggcacactaagcagtttattcggcttttgggtttgcaaagcccttgtggatctgcacctcgcctgcggaaaacgcgcgctcctcgccgctatcgagacggacgagcaggtgcgcttcgtcgctgataccggtgacgacaccgcggtacgtctcctccccgagcgagaacgtgatggcgcggccggtgaggaacgaatggctgcggtacgattcgatgaacgcgtttgagccgaggttcttatacagcgcgaaaaagcggctgatgacggcagccgaaatgcggctgcgcatctccacggggcacgggccgtcgaaaatagcaccggcgatggagcgaatctcctccgggaagccctcttccggcacagcgatgttgatgccgatgccgagcacggcccagttgagaccgccgttttcaaaatcgacggaagcttccgttaaaatgccgcagacctttttctcgttgaggtaaacatcgttcacccatttgatttgcgggtttagccccgtgacctgctcaatggcttcgcacacggcgaccgctgcggtagtcgtgatgaaaagcgatttttcagcggtgcagtgcgggcggagcagcaggctgaaataaatacctgtacccggcggcgacgtgaagtgccgaccgagcctgcccttgcctgccgtctgcgattccgcaatgagcacggtaccctccggcgcgccctgctccgcctgtgcctttaaaagcgtattggtagaggtgacttcggtctgcacctgcaagtaaaccggcatatcggtatcgaggaaccgtgagacactctgcacggtgagcacatcgctttccggcgccagcgtgtagccgcgctttggcacggcgcgaattttatgcccggcttcttcaagcttttgaatggctttccacacggcattgcgggaaacgccgagcgacgacgcaagctgctcgccggagaggtattctccgcgatttttttcaagcgcgtctaaaactgcatcttgtatgcgcataaatttcctttccggcaaaaccggcagcgaaaatttcgtctaccagtttaccacacacaaagcgtttcgtcaacctaaaattaaaattaaggtgacgaatgacaaaacaccgattgaatggaacaacaaaagcccgcacagcgcatggttttgcactgtgcggacaactattccattacttcttttttttgaagccgtccttcagcgaaacggagcggttgaagacaaggtggtcttctgcggaatccttgttatccacgcagaaatagccctgacgcatgaactggaagctctcgcccggctttgcggttttgaggcccgcttccaccttgcagcccgtgaggaccttgagggaatccgggtttaaaagctctaagaaatcgcctgcatccgggtcttccacagtaaagaggttatcatagaggcgaatttcggcgtcttcggcgttcttcgcgtccacccagtggatggtgctcttgatcttgcggccgtctgccgggttgccgccgcgggactcggggtcatactccgcatagacctcgacgacgttgccgttttcgtcctttttgcagccggtacatttgacaacataagtggttttgaggcgcacttcatttcccgggaaaaggcggaaatagccctttacaggggtctccatgaagtcttcggcttcaatgtacagctcgcggccgaacgtgaccgtgcgggtaccgtcttcgggacggttcggattattctcgacctcgaacgtctcggtcctatcttcgggatagttcgtcaaaatgagctttacggggttcagaacgcccatgacgcgctttgccgtgaggttcaggtcttcgcgcaggcagtgctcgagaaagctgtattccacggtagagttcaccttggaaacaccgttgcgcacgctgaaattgcgaatggaggccggggtgtagccgcggcggcgcaggccgcagatggtgggcattctcgggtcgtcccagccgctgacataaccgccttcgacgagtgcgcgcagcttgcgtttgctcatgaccgtgttgttgatgccgaggcgggcgaactcgatctgacgcggctttgcgggcagcgtgacgttgttgataacccaatcgtacagcggacggtgatcctcaaattccaacgaacacagcgagtgcgtgatgtgctccatggcgtcttcgatggggtgcgcgaagtcgtacatcgggtagatgcaccatttggtaccggtgcgatggtgcggcatgtggttgatgcggtagatgaccgggtcgcgcatattgaagttgccggaagcgaggtcaatctttgcacggagcgtcattctgccgtcttcaaactcgccggcgcgcatgcgggcaaacaggtcgagactctcctccatcggacggtcacggtacgggctctgcgccggggtggtgaggtcgccgcgcatttcacgcatctggtcaggcgtgagctcgcaaacataggcaagaccctttttgatgagctctacggcgccgttgtacatatcttcaaaataatcggaagcatagtaaaagcggtcttcccaatcgtagccgagccagtggatatcttccttgatggcatcgacgtactccacgtcttcctttgtggggttcgtgtcgtccatgcgcaggttacagataccgttaaagcgctctgcggtgccgaaatcgacgtagatcgccttggcgtggccgatgtgcaggtagccgttcggctccggcgggaaacgggtgtgcaccttcatgccttcgcagcggccgccctctgcgaggtcttctataataaaatcatcgataaaactgctgctgatctcctcggagaccgcttcgtttttgatctcttcactcataatttgtccatacctttcctaatatcaggtttttcctcttgctttatgcgttctcgatcttttgaaggccgagctgcaaacggcgcagcgcctcctctttgccgagcacggcgagaatttccatagcgccgccgggggtaacggtctggcctgccgccgcgatgcgtaccggccacagcagagtgccgtttttcacttcgaggctctgtgcgagggcaatgagtgcatcgtggatggtatcaacctgccagttttcgatggcggacagcgtctcgatggcggcacgcagcatgacgggcgcgttctcgagcgttgccttgctctttttgtttatgaagaggtctgcggaatattccggcagctctttgaagaagccgagcaggctcgggatttccttaaacttcaaaatacgcggctgcaaaatggcgtcgagcacgtcgtacggcttttctgcgtcgccgaaaatctctttgtagtacggcatcgccgcggtgcggaactcttccccgctcatcttgcggatgtattcgccgttgaaccacaggagcttatcgtaatcgaacacggcgggcgatttgctgatgccgtcgatggagaatgcttcttcgagctctttcagcgagaaaatttcccggttgtccttcgggcaccagccgagcagcgcgatgtagttcgtgatgaccggtgcgaggtagccgtcttcgaggaggccctgaaagcttgtggaaccgtggcgcttcgaaagctttgagacggagccgtcttcatttttgcccatgatgagcggcaggtgcacataaatcggcttttcccagccgaacgcgtcgtagagcatgttgtacttcggtgtagaggtgaggtactcgcagccgcgcacgacgtgcgtaatgtgcatgaggtggtcgtcgatgacgtttgcaaagttgtaggtcgggtagccgtcggactttaaaagcacctgatcttcgatctctttgttttcgatcgtgatggtgccgtaaacggcgtcttcaaaggacgtggagccctcgagcggcacacgctgacgaatgacatacggcataccggcgtcgaggttcttccgaatttcctctgcgggcaggtcgcggcaatgacggtcgtagccgccgaactcgccgtcctgatgaatggactcgaggcgctctttggtgcagaagcaatagtatgccttgccctcgcgcacaagctgctctgcgtagggtttataaatatccttgcgttcgctctgtacatacgggccgtattcgccgccgatgtccggtccttcgtcatgctgcagaccgacttgctgcagtgtattatatataacgtctgttgcgccttctacatagcgctcctgatctgtgtcttcaattctgagcacaaacgtgccgttttgggacttcgccaccagatactcgtacagcgccgttctgaggtttccgacgtgcatgaaaccggtggggctcggcgcaaagcgtgtgcgaaccattaaaacaacctccttggtttttcggtgcgttgctctccatgccgccggcatgaaagaatactacaccatcatataatgttctattatatatctgtgcgcagaattttgcaataaaaaaacgggaaaaagcgccatctttttcccgttttctgttcttaatcgcccttgaggaacgccacgtactcttcaagacacatgttaagctcgttcatgcgctgcgcgtgctccttgccgacgtagcggtaatgccacggctcgtaatcgatgccggtgatgctctccttacctttggggtagcgctcgacaaagccgtattctgcggcgtgctcctgcagccatgtgtaggctttcgtctcgcggaaatcgtcttcaacgtcgttgaaatcaaccgcaaggccggtgtgatgctcgctgtaccccggcgcctgaatggtgatccgcgcgtcttcatacgcgttttcataggtcatgccgtctgccatgcggcgctgcacggcgcgatccagcacgctttcctgctcctccacgctgcgatatcccgaggcaacccacaaattgatctcgtcgttatacgctgcattgataagcgccgtgagccccgggtacattttggagttgacggtgatggtatcgaacagcgtcggggtcatttggaaatcgtccggcagcggcacttcgctgttcacgagcacgaggcgccaatcgccgagctgctgaaaggcagattcgggagtggaggtcgttttagaaagcacacttgctttggctgaaatgctctccgcagcggtgctcggtaccgcttccggcgaggcagcagcttctatgggctctgcattttgatgcggcatggcaagcaacgctgtgatgataagcacagccgcaatgcaccctgccccactaagcaaaagccgtgcacgcgatttcagtacacgtgcgggaatcctgttatgcttctcccgtttttgcggctgttttaatctgtaatgtccaccttgcggccccgccatgtgctttgccacgttcatgctcccttttctttcgtatcttctattgcaagtataccacataactggtatactaatccatagtttctaaattgttttttcatctttttttcattttgaaggagtgaccttgatgaaaaggatctttatgcgcggcaaccccggcgattttgcaaattatgtggcggcgctgacggcttgcggcgcggagccggtaatctcgatgacactttccgacgcagacacttgcgacggcctgctgatccccggcggcgccgatgtaaatcctgtgctctatgggcaggaaaacacggcgagcgaaggcatcgatgacagccgtgatgcagacgagattgcgcttgcaaaatgcttttttgcagcgggcaagccggtattcggcatttgcagagggcaccaggtgctgaacgtggcattcggcggcgacctcattcagaatgtgccggacccgcagcaccacatggcggcaaaagagaccggcgacgccattcacacggtacgcgcgcagcatgatctgatgcgcgaattttacggcgaagaattccccgtgaacagtgcacaccatcaggccgcaggtaagctcggcgcgggacttatccctctgtgcgtcagcgacgacggcatcaacgagggctttatccatgaaaacggcaaagtgatcggcgtgcagtttcacccggagcgcatcggctttgcgcaccgccgccccgatgcagtgaacggcgaaaagctgtttcgctattttctgagtctgatttaaagccgctttcctctattttccgcttccgcataaaattgtgaaaaaactgcttgcttttttcccgggcatcgtgtataataaattcgttatccgggtgtagcgcagttttggtagcgcgcttgaatggggttcaagaggccgcaggttcaactcctgtcactcggaccataactggacaccaatttcgatacgacgcgtatcttgattggtgtccagttcctttattacagaagttttggtttccatgggtctttaccatacgatttaatcatctttttttcgcagaaatcctttccggtaaaaaatattgcagagaccttcggtgatgaactccgatgtttattttcaccatgtatttgttctattcaaagataaagcagggattttaatgaagcaaaacaaaaacggattcacattgatggaaatgctaattgtcattgcaatcatcgctgtattgattgcagttgccattccggtatttgcgtcacagcttgaaaaagccagagaagcgacagatcttgcaaatgtccgctccgcttatgcacaggtgtctacagaggcgttgctcggagattctgaggctaccgtaaccgtcaacctaaaacagaagcaggccgactggcaatcagtagatcctgtgaatatcggcggtattgttcattccaaaagccaaggagacacgaagaactggataggcgttgctgcgccaaacggaacctgtgtcgtatcgtataaggaagattacggaatcattctcacttggagcggaaaagccgatccatctgaacctaaatacccgtttaacacaaacgagacggatttcttcccacttctatacgaaacggaattttggcaagacatgaaaaacaatacaaactttgagtttgactccagatgtccggattcgaaatatgttccagccattaccacagagattaataagctgaataaaagtcttttgcagcagcctaattgcacatgggcctatcttggcgacggaagagatagacgagaagcatatcggtatcttttctggacatctctggacacggataaggtcgggcccggaaaggaaatccccgtaattattcaaaccggcaacgggaactattatgtttccgaaaccacgaccggtaagcgaaacggtaaggactatgttaccgtttcaaaatcgcttattacgcaaaatcagtataaggaaattctgaaaaacgggaaagagttttctacgttggaagcggcttacgatgcctacctcaaagcattgggtaattccaaatacaattccgtacgccagtcccagtcttaaaatgctctattccgttacaacctctaaatcagcattctcagcaacttcgtcaaatgcaaaaagagacagcttaaagtgatatgcccccataccgggtgtccggtattggggtacatatcaaagcaaactgtctcttttttacttgattgattatgtagttatactgcctgcaagcggtatttttccgcgtaggtgccgtaggcgcggcggaagtcggggtcgtcggcacgcatggcgcgcagcgtttcgtgcagattaagaccgtggtttgccgcatccagaacacagccggcgatgttggagcagtggtcagccgttcgctcgagatccgtcagcaggtcggaccacacgaagcccgcttcaatactgcaatgaccctgctgcatgcgcagaatatggcgcgtgcgcatctgctccttcagtgcaacgatgacctgtttcagcggctctacctgtgcggcggctgcaaggtctttttcgctgaacgcgcgctctgccgtattcaatatctcactcaccgcgccgatgagcaccttcagctctttttctgcggcggcgctgaagccaagtcccttgctgcgcagttcttccgacgccgcaagcaggttcacggcgtggtcggagatacgctcaaaatcgccgataatttttaataattcggtggcttcttcgctttcggcatcgctcagctgctgggcgctcaggcgcaccaggtatgtaccaagctcgtcttcgtagcggtcgcagcggctctcgttttcacggatggattccgcaagctccggcgaatagttttcaaaggtcgtcagcgccatatgcagcgcttcgcctgcgcagcgtgccatttcgcccgcaacggcacggcagcggccgagcgcgacggacggtgtgatgagcagacgttcttcaagctcaacaggctgctctttgccgcccttatccggcacgatgcggattgcgagcttttcaagcaggccgcctgccggcagcagcatcgccgtgcacaggatattaaagagcgagtgcgcaatcgcgatgccggacatggtggcgttttcatccagaatagccggtgcaaacacgatctttacaatccagaaggccgtcagtaacacgaccacgccgataacattgaacatcaaatggacgactgccgcgcgctttgcgttcttctgtgtgcccacggaggagatcagcgccgtaacgcaggtaccgatattctggcccatgataatcgggatagccgccgcgtagctgacctgccccgttacggccaatgcctgcaaaatgcccacggaagctgaactggactggatgatacctgtcaaaagcgcgcccgcaagcacgccaagaatcggatttttgaacatcaggaacagcgaagcgaacgccgggacatctttaaggcccgaaaccgcgccactcatggtttccatgccaaacatcaaggtcgcaaagccaagcaggatcatgccggtatctttctttttaccggacttgcagaacatatagaaaatgatgccgatgagcgccaaaacaggcgtgaaggatgacggctttaaaagattcacccaaatattgctgccgctgatgcccgcaaggctcaacagccacgccgtgacggtggtgcccacgttcgcacccatgataacattgatggcttgccgcagtgtcatgagcccggagtttacgaagcccactaccatgactgtcgtcgccgacgagctttgaatgatggctgtgatgccgaggcccgtcaaaaagcccgccggtacactgccggtcattttatcgagcaagctttgcagcttgccgcccgcgcggcgctccaaggcctgccccatcaggttcatgccgaacaggaaaagacacagcccgccgatcatcgtcagtacattgaaaatatccatactcgattttccccttttaacattcttttacacgtataggagtatatcgtgtctatgtcaaatcaactgtgtgttctttgtaaaatccatgtaaaatcgcttgttaaaaaacgacacaaagcatgaatatcccccggcgaaaagccggaggatatctacgctatgcgtcctgttaaatttggctttacacggtgccggtgataacaacctccgcggtgccgggtgtagtggtccatgtgccgttttcgttttgcgtatactgcgcggcgggaacggtgatctgccccggaagcgttgcgaacacgccggtcgtttcgccatacgtgtactgcgtacctgctgtccaagcggtgccgttaaacgtgaccgcaatgtttttgaggatcgggtcaaacgtatcggtcagcacgatgcgctcggcttcggaagcttcggtgttgcccgtgttttcgatgacgaacgtatacgtaatctgcccgttccccgtgacgaccgcaggacacagcgctttgctgatggtgagaaccgcgcgatcctccgtggagaccgtttccgacgcgctgacttccagattgccgtccgtgacatttgcggtattcgtgatgctgccgtccgtgccgagcggtgcatacgctgtgacctctgcctcgtaaacgagcatgatgctgccgtttgcggggacattcgggaccgtaatgacgagcggcggctccgacgttgcggtgggcgcggtctgcaagacgccgtttacataataccgaacagaattcgacacatacgcgagcggatagacggtcccgctattaaattcatacgcgccgaggttatcggtgaccgtgagatttgtcaccggctgcgcaccgctgtttacgatagaaatgatatacgtaatcttatcgtttgcggcgtaatttttcaccacggcggttttggtaacggtcaaggcctccaaaagctcgcccgtgacggtgttggaattcgttgtgcctccgttatacgaaagcgtcgcgaaatttgtaaaagatgccataaaacccctccttgttttcggggacttgccccttgtacaagttatgccgaaggaggtttaaatgacacttttgagcttgtggctttttgcattcttcatgtctttttaaggaacctcttgatagggtttcttacggctaaacagcccaccggaccatttagcctatctttctgatctgttgtgagacaaaaggatttcgagctctgcggaggtcgtgggcgagctcggcgtgctgcgcatgcagccggaactggtgcgtgcggcctgtgaacgcgcccatgcgctcgacaaatttctttaattttacataatttagtttacataaagctattgacataattagatttcgatcacttaaaaatctcctttgaagaacccataaaaccgggcttcaaaggagattttcgttttgttatcggccgagcagcgaaagattatagtcctccatgcacgtcgcaaggccttcggcagtcgtctcaaatccaccgccggcatttttgagctttgcacaattcatccagaggttttcgccgccggacttttcctgcaaattgagcttcatgcctgtttttttcataaacagctccgcaagcgcgtacatggagacgtctgcctcactgccgaagttatacgcgccaccgggcaaattcacagcctgcaaggtctgctctgcaacctcgcgcacataggtgatgccgcgaaattcctctttggaaagtgcaagcggcttttgggtgatggcggcgttcaggaacatcgtgatgaggttgctgcggttcggcacgccgaacatgggcatgtcatacatccacgtcgcacgcagcatgacggcgttcgggtcgatcgcgagaacgcgattttccatttccaacttctcttcggcgtagagatttgcggtcgcaacgtcgtcttccgtaaacggcttatcgccctttgcgccgctgtacacctgatcggagctgaacaacacgagcttcgcaccgtttgcggctttggccaaatactccggcaccaaaacgtttgcgtggtatgatccttccgggtctttggcacacgcaccgatgtccgagattgccgcggtgtgaaggatggcgtccggttgcacggtgtcgatgaggcggtcgatatcctctttttccgccccgcgcagagacggcgcacaaataacgggcgccgccgcacggatgcgtgcccctacaaagccatttgcgccggtcaacagaattttcatgataaactcctccctggttttaaaaacgacccgacaaagctgccgggtcgtctggatgcaaaatgaattatgcgttttcggtctctttgtagcggcgtgcgcagtcctgcacgatggcgttcatcgcgtccattttattcagcatgtcctttgcaagggcaatctggcagcgcgtacgaacaaggttatgctgtggctttttgaccttaaagtacttatcgccgacgatgtagtccgcgaggaagcgcgttgcaagctcgcaggtaagcgcaaagcaactgagcgccagcgtatccacttcggttttcgtcagagacgcggcggtctttttgaggaagccctcggcaaatgcccagaaaatattgaggtttacgccggccttttccggataatcgcaatcttcttccacaaaatttgcagcgaagcggatggcatcgccgaaatcgtggccgacaaggcccggcataacggtatccagatcgatgacaacgagcgcctcgtgcgtcttctcatcgaacagcacgttgttgatctttgtatcgttgtgcgtaacgcgcagcggaagctcgcctttttcaaagaggtcggtcaggcggcaagcctcgtcctctacggaaagcagccaatcgagttcttcgcgcacctctgccacacgattgcacgggtcggcagccatgtcttccttcagcttctcatagcgcttgcgcgtattgtggaaatccgggattgtgtagaaaagggagttcgcatcgaaatctgccaacatcagttggaaatcgccgaacgcctcacctgcactgcgcaccacgttcaggtcgtcgcaggtatcgaacgtcacagacggcacgtagttgctgagccgccagaagccgtcattatccatcaaatagttgacgccgtgcttcgtgtgatggaaatgcaggcttttcgtattcgggcatttttcacggatgtgctccgtgacacggtcaatgttctgcatcagctcaatcgggtgctgaaacgcatatgtattgacgcgctgtacaaggaaagacttaatctttgccatgccggtaccgtcatcgcgaatataattgactttgtaggtgtggttcacgttgcccattttgatttcttcgtacgagaagaacgggccttcaatgcggaattcttcgccgacctcgagtaactttcgggcgatctccgggttcatgtccatttccggaatactcataatcctctgctccttcaattttctggcagtttggccgctgctttttaagcataaacataaagggaaaactataaagattatagcagaaatacggtaaatttcaagtcgaaattatgaataggcgcaaaaaggccgtttttcttcaaaaacgatatactgccgactactttttttgactgtatgacctctcgaaaacacaaacaaaaaaggactctgcatttctgcaaagtccttcttggagctgctaaccagattcgaactggtgacctcgtccttaccaaggacgtgctctgcctactgagccatagcagcatacgcaaaaggcaagatgaactcgccttttgtggcgacccggaacgggctcgaaccgtcgacctctagcgtgacaggctagcgttctaaccaactgaactaccgggccatggtggcaggggcagtaagattcgaactcacggcacgcggttttggagaccgctgctctaccaactgagctatgcccctatttatctcacggcctcttttcgaccgctcgattattctaccacgaactgcggaaaatgtcaacctattttcccaaaaataattattttttacccccgacaaggtgctttatgcaaaaaatgcagacaccgtgccgaaaaacaggaaacgcccgtccttttggaacaggcgtttcggtaacttaactttagcgggaaagatcctgagaaatcttgtagagcttctcgtcgaagacacgcggcatctcgagggcttcggtaatgtcgaagtccacgatgcgttcgccctgcatgacgacaacgcggttgctcttgccgtcgcggagcagctcaactgcgtggtagcccatctggcttgccacaacacggtcacggagcgtcggggaaccgccgcgctgtacatggccaaggatggtcgcacggctctcgatgccggtctcctcttggatgcgcttgcagatatcttcggagtgacctacgccctctgcaacgaccacgatgaagtggcgcttgccggtcttctgtgcgtagcggatgcgctcgatgatgtccttttcaaagtcatacttcacttccgggacgagcgttgcgattgcaccgacagcgatgccggtgttgagtgcgatgtcgccgcagcgtctgcccatgacctctacaacgctgcagcggtcatgagactctgtggtatcgcggatgcggtcgatcatttccatagcggtgttcatcgccgtgtcataaccgatggtatattcggagctcgaaatatcgttatcgatggtgcccggaacgccgatgcaaggaacgcctgcgccggtcaggtcgcgtgcgccgcggaaagatccgtcgccgccgacaacaaccacgccgtcgatgcccagttcgcgacatttagcagctgccttttgaacgccctccggggtattgaactcggggctgcgcgccgtaaagagcgctgtgccgccgtgctggatgatgttggaaacgctgcgaagctccattttctgcacttcgccggtcagaagaccgttgtagccgtgacgtacgccatatacctccatgccgaaggagatcgcggtgcggacaacagcacgaaccgcagcattcatgcccggtgcgtcaccgccgctcgtaagtactgcgattttctttgcacacattgtaaattcctccactttcttattgaaaattgcaaagttaaaaatgcaattcagcaatttattccattcatttttgattataccccttttccctgacggtttcaagaggtattttgtcttttttgaaacggtttttgtttttttgagaatttcttattctttcagcgcaacatttccctcgccgagaagttttttcaatgcggagacgagttcgtagttcaccgcaacgcggtaacgggcgggcgcgcggaccagctttttcgtgtccgtataatatagatagaggtcggtcacaccgtcgaaaatctcgatgtactgcatcgcctttttgcagagcgggtcttcggcgttcggcacacgcaggtaaaggcccttataggctgtgttatagcccttaatctgcacaccgggccgctcttccccgcgcggcggcgtgacgctttccggcacaacggcaggcttttgcgaggcccttttcttttcctcaggcgcaggccttctgcggatcatcatttcttccggcgaaaacggtgccgaggcatattcgcagatgaatttcgggtctttttcttccgtaaagctgatgcgtccgtgcgcccaaacagagccgcccggcgcaaaaaggtcgccgtatttttccaaaaccttcgggaaaacaagcgcctccatagagccgtacatgtcttccagcgtgacgaacgccatggcagagccggagcgcgtcaccttctttttcacgctttccacaacggccagaacgtccacatactgctcgtctttatattggtcggattccccggcggcgctgcaggcaatctcatcaaagcgcgcggcgatgccggcgttatagacctccgcatacggcgacatggggtgcccggaaaggtacatgccggtgacttccttttccatagaaagcagttcggttttggggaactcctcggctttcggcatctcgaaagattccgttttctcctccccgccgaagtcaaacaggccgatctgtccctctatgttgcggcgtttgtcgtcctccagctgatcgagcagcgggccgaccgccatcagcatttcgcggcggttgttgccgagaccgtcgaacgcaccgcagcggataagactttccacggcgcggcggttcaggtctctgccctgcatgcgcttgcagaaatcgtagaaggtcgtgaacgggccgttcatcgtacgctcggataaaatgcgctgtatcaggccgcgtccgaggttgcggatggcgagcaaaccgaaacgaatgctgttttcaaaaacggaaaagccctgctcgctctcgttcacgtgcggcggcagcacggcaatattcagcctgctgcattcttccatatacgccgcaatcttgcctgcggatgcgagcacacttgtgagcaacgcggccatatattctttcggatagtgatatttgaggtacgccgtgcgatacgccacaacggcatacgcggcggcatgggacttattgaacgcgtaggacgcgaaacttttcatctcatcgtagattgtctcggcggtctgctcgtccacaccgcgggcgatgcagccttcaatctccacggtgccgtcctcacgctttaagccgtgaatgaaatactcgcgctcctgctccatgacatcgtgctttttcttgctcatggcgcggcgcacaatgtccgcgcggccgagcgaataccccgcaagctcgcggaaaatgcgcatgacctgctcctgataaatgatgcacccgtaggtgacatccagtattttggaaaggcgtgggtggcggtacgtgattttatccgggtgcttgcgattttcgacgtacatggggatgaacttcatcgggccggggcgatacaaagagataacggcgatgaggtcttcaatgcttttggggtcggattgcatgatgacacggcgcataccggcggattcaaactggaacacgccctctgtcgcaccgctcgcgatcattttaaacacgtccgggtcgttatccggcgcgttttccaccttaaagcccggcgtgtgtttcgcaatcatctgctcggcgtggtcgataaccgagaggttgcgcaggccgagaaagtccatcttgagcagaccgagctgctcgatggccgtcatcgtgtactgcgtgacgggcgaatcgtcgttcatgctcagcggcacgtaatcgacgaccgggcggtctgtgatgacaacaccggcggcgtgcgtagacgtgtggcgcggcatgccctcaattttgcgtgccatatcgaggagctcgtgcacctgtttgtcgctttcatataaatcgcgcagctcggagacgcgttccagcgcggcatcaatcgtgatgtcgagctccatcggcacaagctttgcgacggtatcgcacgtcgtgtacggaatcgccatggcgcggccaacgtcgcgtatcgcaaggcgcgccgccatggtgccgaacgtgacgatctgcgccacatggtcggtgccgtatttttccgtgacatactcaatgatctcctgtcggcgctcatcgctgaaatcgacgtcgaagtccggcatactgacgcgctccggattcaaaaagcgctcgaacagcaggtcataccgcaacgggtcaacgcccgtgatgccgatgcagtatgcggcgaggctgcccacgccggagcctctgcccgggccgaccgggatacccatgcttttcgcctgacggatgaaatcgtacacaatgaggtagtagtttacataacccatcgtatcaatcgtcgaaatttcatattcaaggcggtctacgatttcttttttcgggttttcgccgtagtatttgtgcagacccgcgtaacacatgcggcggaaatattcgcggttgtcgctgccgtccggcgtatcaaagtgtggcagcttcgttttgccgaactcaaattccacattgcagcggtcggcgattttctgcgtattatccgctgcctcgggacaatccgggaacagtgcacgcatttcgtcttcgcttttaaaatagaattcatcggagccgaattccagtgtatcctcatcctccaccgtgcggttcgtctggatgcagacgaggatgtggtgcattttggtgtcttctttttcgatatagtggcagtcgttcgtcacgacgagcggaatgcccgtatcttttgacaatcggattatttgcgggttgatatgtgcctgttcgcgcaggccgtggtcttgtaattcgaggtaaaaattgtcctcgccgaaaatctcacggtagcgcagggcggcggcttttgcttcgtcatagtcgccgacggaaagcgcacgcgggatctcacccgcaaggcaggcggaaagcgcgatgagcccctcgctgtgttcacgcagcagctccatatcggcacggggcttgctgtaaaaaccctctgtccacgctttagagacaatggcgacaaggttgcggtagcccgtttcgtttttgcacagcagcacaagatgccggttttcgttatcgatgccgtgaatcttatcgaaccggctgcgctttgcaacgtagatctcgcagccgatgatcggcttgatgccgcgctttttcgctgctttataaaagtcgatcacgccgtacatcacgccgtgatccgtaatggcaacgcttttctgacccattttctgcgcttgatcgagcagcttttcaatgcggcaagcgccgtccaaaaggctgtattcggtgtgcacatgcaaatgtgtaaacgccattttcgccctccttttccatttaagtttacataattaaatttacataagtatctaattgctattttcaatcacaagggtaaatccgtgctcggtggaaaaatagtggtttttatctccccacgcggtatcgatcacaacgtagtatgtgccgtcgttttcagggtacgcaaaccgctcgctgcggtagtaaagctcggagaaatcctcgttatagaccgtgtaatacattgcgccgtagggatcctgcgaggcttcaagcacgatgcctttatccatgcgaatgaccgggaattcatcggcaacctcttcaatttcaaaatgccctccgcacgcttttgaaccgttcttcctttgctcgccggtcacgttctgcagcgcggtaatctcttcattgccggagcgcactacgatatcgccgggcacaagctcggctttcagcgcatctgcgatgaaatacgcgcccacgccgagcaccgcaacaatcaaaatgcccaacacaaggtctttaaagctcttcggtctttgcattttcagcatgcagcttttcctccacttcaaaaacgctctgctccgcaagggattcctccggcgaaccgagctgttccgcaaactccaaaatgcggcgcaggcggtgattcacaccggaacggctgatggaaagccgctcccccatttcgcgcagcgacatttcggggttttccagccgcaaaacggcggcctcgcgcaggtcggcaggcagctcgtccagccccaccttgtcgctgatgagcgcaatggcggcaatctgctttgttgcagcagagtacgttttatcaagattcgcggtctcgcagttcgagacacggtttaaattgttgtaggtctctttgtacattttgatctgcatcaggttcatggcggagtttaccgcacccgtcagcgtgaggaaatcctcaatggcggcgctttcctttatgtagacaatgtagctgttttttctgcgtgcaatggacggcgaaagctgcgcggccttcacgcggtgcagaacagccacaaggtcttccgcaaggtgcaggtacggcgtggaaaactcaaggtggtactccttctgcggatctgtgaccgtgccgcagatgaggaacacgccgcgcagaaatgccgaaatgcagcagtccttttgcagattttcctcatgaatatgcaggttcacgtcattctcatcgtgcccgaacgaacggatcatctgaatgcgtgcggcttcacccggaatggtgatggcatacgcgccgatattcttgcgccttaactgcgagcgcacctcggcgtatacaccggccgaaacggcggcggcctccgccacacggcgtgcaacggcggcattttcgcataccatctgcgattcccgcgcggaaaaacactttgaaaaaagcagaaggccgtagcattccgctttcaaacagcacgcgcgcttattttcaatcatacacagctcttgcttgcaatccgcagcaaatgacatgaaaacggctccctcccgctttattgtttcgtgatatcccggtgcgagaccgtggcgtgaacgccgtttgcgacaaggtgatcgtgcatatactgcgcaagcgccacagagcggtgatgcccgccggtgcatccgaccgcgatgacgagctggcttttgccctcctgaatgtagagcggcagcatgtaatcgatcatgtccgtaaagcgggttttaaagccctcggtttccttgcagttcatcacgtagtcgcgcacgggcgcttcaaggccggtatgttcacgcaactcctccacgtagaacgggttcggcaggcagcgcacgtcaaacacaaggtcagattcgagcggcagaccgtatttaaagccgaagctgatgcaatgcaccgtaatggcgtcgttgtcgttctgcaaaaacaggtcggaaatgcgcgctttcagtcccgccgccggaatattcgacgtatcgatgacgtaatcggagacctctttgaccgggcgcagcatctcgcgctccaggcgcacggcctgctccaaagagccctgcatcgcttcggaaagcgggtgcttgcggcgcgtctcctgaaagcggttgacaagcacgggctcggacgcatccataaacaaaattttatacggctcgttctgcgccttcagtgtttcgagcgcgctgaaaaatgacttaaaaagctcgccgccgcgggtatccgtgacgaccgccacgcggcgctgaataccctcggatttatcgcaaagatcgtaaaagaccggaatgagcgccgggggcagattatcgacacaataaaagccgatatcctccatggcgtgcatggcgcgcgttttgcccgcgccggataagccggtcaagatcacaaattccattttaaaaaccaccttttcggcagccaaatgccaccgtaaatcccacaaattttactcgctgagcgaaatgcggcgaatttccggctccagctccacgccggtcgcctgaaaaactgtatcctgaatggcgcggatgagcgcttccacatcggcacacgtcgcaccgcctttgttcacaatgaagcctgcatgcttttcgctgacgcacgcgccgcccacggcaaagcccttcaggccgcactgttcaatgagcgtaccggcaaaatagccttccgggcgcttgaatacgctgcccgcgctcggcagctcgagcggctgcttttcgcggcgacggcgcatgaaatcttccattttcgcggtaatctccgcttccgcaccgctttcaaggcgcagctccgcgcttgtgatgatgcgcttcgtgcccataaaggcgcttttgcggtagccgaacgcgaggtcttccccgctcattacgccgggcgtgccgtccgcttcaaggaaatggacgcgttcgacaacctgcttcatctcgccgccgtaagcgccggcgttcatgtacactgcgccgccgagctgccccggaatgccccacgcaaattcaaggcccgtgagcccctgcccacgtacaaagctgcataccgtcgcaagcgacgcacccgcgccgcacaaaacatgaccgctcgcaaggctctgcactttcttaaaatcgccctgcagcgtcagcaccgcgccgcgcaagccatcgtccggcacaagcagattggaaccgttgccgaggatgaaatacgggacattctcgtcacatacagcatttaaaaccgcctgcaattcagagacggtcttcacttcgacaaaccgatccgccgggccgccgatcttaaacgacgtgtgggcggacatgggctcatcggtcttatagcatacgccggcactttgtagtgcggcgtcaaatttacggtaatcagacattctcaaagctccttaaaatagcatcggcatccttgcggttttcaaggatgttcgtgtgcgcgcgcagatactcgatgaggcgattcgtgttcgcgttgagaatcagctcctccggaaacgcaatctcgcgcagcatctcgagcgccgcagtgtgatccttcacctgcgtttcaaaatgcgcgtccgagctgacgataaccggcacacggtgctttttgcagcacagcgcaatctcgcggcagttcgggatattcgccttgcgcacctcgaaggaatgcgagttgatctccacaagcttgtggtttcgaccgaactccggaatgaccgtttcataatcgtagcggaactccggactgccgctgtggccgatgacattcaccttcggatcgtgtgcaatgttgagccaaagctgcgtgcatttttcgaccgtgggattctcaagccccggcagtccgaggttgtgaatggacgccacaagccagttgacgtcgcggcgttcggtctcattgatgtcgagcgtgccgttcaaatcgatgacattcgcctccatgcccgcaatgagcagaatgccgcggtataaaagcggcagttcatgcatggaattaaagaaccacgggccgggcgcaccgggcatggtgcgggcgtggtcggtgatggcaatggctttgaggcccttttccgcagcggaatcgaccatttcgcgaatggtgctgtacgcatgcgtagacgccagcgaatgtgtatgcaaatctgcaatgatgttatacatgatgatattttctcactttcagctaaccttaaacgcggttaaaagtctttgatgaaactttcttcaggaagtttacaggttcttagggcagcgccctaagtcgctttccgcaaaaagcgaaacccttttgcctcccataaagatcaggaaggtagatcggacaatccggtgaattgtccgaccgcaggaaaccctatcaaagggggttcctgaacaagatgccaaaacatcttgttttatactaaaatcatgctgttaaatatccaaatctctcttaatctcctcgtgcggcatcatggaagcatccatgccgagcgcggagagcagctcgtaggcggcgttgtagcccattttcttctggcggttgttcatcgccgcaacttcaatgatgatggcaaggttacggccgggctttaccgggatcgtcatcaccggcaccttgatgccgagaatctcggtgtattcactgtccatgcccatgcggtcgtagaccttcgtcgcgtcccagatctccaggttgatgcacatgtcgattttttcctgcagcttaacggcgcccataccgaaaatgcgacgggcgttgatgatgccgatgccgcgcagctcgatgaagtggcggatgttctccggggactgtccgacgagcgatttgctggatacgcggcgaatttccaccgcatcgtccgcgatgagacggtggccgcgcttgatgagctcgatggccgtctcgctcttgccgacgccgctgtcgccgacaagcagaataccttcgccgtaaacctccaccaaaacgccgtggcgtgtgatgcgcggcgcaagttcgacgttcaaatacgcaacgagcgacgcgacaacatttgaggtcgactccgtcgtgcgcagcaccggcacgtggtacgtttcggcaatctccatgaagtccttgccggggtcaataccgcgggaaacaatcactgccggcggcttcagggacaggtagctatccagcgccatggcgcggcgctccggctttaagctctccagcatgtacatttccgcacggcctaaaacggcgatgcgattcgggtcaaaatattcgtggtagccgttcagctccatgccggggcgaacaacgtccctcgattgaatcaaaatatcatcggcgctcttcggcagaaaagcggtctcaagctgtaactcgtgaatgatcttggaaagcggtatggtgtaaacttccggcatcgtgatcttcctccctaaagttaagacggctgcaaaagcctttttatgctgttttagcggcttttgctcctttgttttcggcgtcccacacaaagcacgcctaaggtacctgttatcttatactattatagcggatttgccgccaaaaatcaacttaaactccgcttacccatgcagcgcataaaatcttcttgaaaagtccgtttttgtgcgctataccggtgaaaacaaagcgctttcgcgcacgaatgtaaataaaaatttcggcttcaagcccgtcttaagagatttgagctttgaagggatgaccggcgagcgcgccgcgctcatcgggcgcaacggcacgggtaaatcgaccattttaaagctgcttgcgagcgaagaaagcccggacagcggcgaaatctccctgcgccgcggtgcgaacaccgcgcttttggaacagattccccgcctgcgcggcaaagacgcaaccgtgtacgacgtgctttgcgagccgtttgcggaagttttctccgttgaagcgaagctgcgcgaactggaagaaaagatgacggaggatttcgagcgctatgccgacgcatacaccgaggcgcaaagccgatatgcggcgcttggcggctatgacgcagaaacgcggctgaaaaacatcgtgcaggggtttaagctgaacagcctgctcgagcgaccgtataatgtgctcagcggcgggcagaagaccgttgtgaacctcgccgccgtcgttctgcgtgagccggatattctgctgctcgacgagccgacaaatcacctcgacatgcaaacgctcgattggtttgagggcttcctcgcaaaataccgcggtacggttttaatggtctcgcacgaccgccggtttttagaccgtgtggcaacgcgcacgctcattttagaggacggcatctgcacaagctaccccggcggctacacggctgcgaaagaggagcaggaacgccaaatgctcctcgaatttgagcagtacaaaaaccagcaaaaacagattgaagcaatgaaagccgccatcaaacgttttcgcgagtggggcgcgcaggcggataatccgaagttcttccgccgcgccaaaatgctggagcttcgccttgagaaaatggagatgataaagcgcccgcagcttgaaaagcccaaaatcccgatgcgctttgcgggcgaccgcaccgggcgcgaggttttaaagcttacgggtttctccctttcgttcggcaagaccgcgctgtttgaacaggcagagctgcttgtggaggaaaaagaccgcatggcgtttctcggcgcgaacggcacgggcaaaacatcgcttttacgcgcaattttcggggatgtcccattttccggtacagcgaagttcaacccctccgcgcagcttgggtatattccgcaggagattcgctttttaaacgacaaggacagcgtgctcgaagcattccgccgcgagtgtgtttgcggcgagggcgaagcgcggcaaattttagcaaagtattacttctgcggcgcggcggtgatgaagcgcgtctcttctctttcgggcggtgaaaaggtgttgttaaagctcgccgttcttttgcagaaccgcgtgaactttctcattctcgacgagccgacgaaccacatcgacattgaaacgcgtgagatgcttgaggacgctttgttggagttctccggcaccttgttgttcatttcgcacgaccgctatttcatcgataaacttgcgacgaagatcgtcgtgctcgaaaaccgaaaaatcaacgttttcgacggcacctatgcggactatctgcgcgtgacgggtcacgcataagcgagccgaaatgcaatgaaataacaaaagccttacgccttgctcttttttgagcttggtgtaaggctttttgccgtttatgctttctttttcagcgggtcccacacgcccaaaagatagaacgcgagcgacaatgtactggaaattatccagccgaacggccacgaaagccagatgcctgtgatgccgaacggatgcaccagaataaacgccagaacaacgcgcagaatgaggtctaagaacgtggtaatcataaaatataccattgcacccgcaccgcgcagcacgccgtccgcggcaagctttaatgcgaggaacaggtagaacagcgagacaataagcagaaattttttgccgatctcgatggcctccgccgaggtgctattcataaagagcagcaggaggttttcgccgcagaacacatacgcgcccataaagacgagcgccacggcaaacgatatcacaagccccgctttgaagccgctgcgcacgcgttccattttgcctgcgccgatattctgccccgtaaagctcgaaaccgagttgttgagcgccgtcaatgacgtggtggcgaacgtgttgagctttacgcctgcggaatagcccgcgatggcggaggagccgaaaccgttgacaagtccctgaatgcacaaattgccgaccgaaacgaaactttgctgcaaaatgctcggaatggctacgatcgaaatacggcgcagcatcgcaccggaaaacagcgcgggcttttccttggtttcaatggatttcaaacggcgcaagaccgcccagaacgcacacgcggaagccacgccctgtgcgaggaacgtcgcccacgcaacaccgccgacgccccagtggaatatgatgacgaacacggcatcgagcacgatgttgccgacggacgacgcgatcaaaaaccacagcggcgttttgctgtcgccgagcgacgtgaacacgccggaagaaatgttgtagataaaaaggaataaaagcccccaaatgtaaatagcaaggtacagcgtcgtatcttccatgatgttctccggcgtgccgagcatgcgtaagattggctcgcacagcaccgtgccgacgaccgtgagcaccacgccaagcaccgcaacagaaataaagcccgtatacgccgccgttttcatttctttaaaatccttcgcgccgaaaagctgcgagatgacgaccgaaataccgatgttcatgccgaacgcgaccgccatgaagatcatcgtcacggggtacgaagcgcccaccgccgccaacgcgtcttcacccgcaaatttgcccgcgatgacgctgtctgcaatattgtaaagctgctggaacgccacactcaaaagcatcggcagcgtgaaccgcagcaaaacacctgccggcttgccggtcgttaagtccttattcatgtccgttttcccttctcttttcaaaatacgcacatttattataaggaattacgaccaaaacggcaatgttcaaaatgcccaagcattttcacccacgcgcagaaaagactgcgcgttcggcaaaagcccgcctaaagtcataaacaaagcccgccgaaaaacgcatttaaaacgtctttcaggcgggtttgttcacttctatgcacgtcagcgcgccgttttccgctttgtacaggcgcgtacagtatttcagcgcgcccgggcggtgtgtcgtcaaaatgcacgcggtgtccggcagcgcggttaaaagatttttcagaacctgcgcttcggtcttttcatcaagcgccgaggtcgcttcgtcaaggagcaagatcggcgcgccgcgcagcaccgcgcgggcgatggcgatgcgctgcgcctgtccctcggaaagcccgccgccgtgctctgtgatcttcgtgttcacgccgtttggcagcgatgacacaaacacccatgcgcaggcggttttgagcgccgctgtcatttcctcctccgtggcgttctcttttgccatgcgcagattctccgcaatcgtgccggaaaacagcgtgctgccctgcggtacatacgaaaacgcacagcgcgtctcggcgctgatgacgatttcgcatccactcttcccgcgcagcacagcacgtccgctttccgggtaaacgagtccgagcaaaacacgcaccagcgtcgttttccccgcgccggatgtgccaacaagcacggcaatctcccccggccctgccgcaaacgatacgtttttcagcactgcttcgccgtttcggtatgcggctgtcacatttttgagttctaccatcagtgcgccctgcggcagggccgttttaccgtggcgctccttcggcagctcgcaaagctcacgcacacggtgtgcagagatcgccgtgctcaaaaacttcgggataagccctgcggcactttcaaacgcacttgtcaggctgctgcgctgctgcaaaaaaagtgtcagcgtaccgaatgtaatggcacgcgtccacaataaatacagcccgtagcccatggcggtaaactgcgtgaacgcccccgcaacccgcaaaagcgcattcacgcgcacggaaaacatgttgtattgcaaactgcatgtgcgcagcgcttcctgtttttcctttagctttcggctttggctttgcattgtgccgagcgatttcaccgtgtcgaccgtgtaaaacgtctccgcttcaaacgcggtcatttcgctgccaaggcggcgcagcttattttcaaatgcccgccgctttttgagcacggcgacagacagcagcaacaccaccggcgcgccgccgagcgcgatgagcgccatcgcggggctgtaaatccagatgaggaaaaacaccgcgcacagcctgtaagccgtcaccaaaatttgcggcagccagctcactgccccgccgcccacagcacccgtatccgtttcaaagcgatttaaaatgtcgccgcaggaaaatgcgtgcagcgcctgccagtccgcgtctaaaatgcggtcgaacacatcggcgcgcacgttgttattgaggtcaatctccagctttttcagcacgcggctcaccacgcagtcgaacgcgatggagaccgccgtgctgccaatagccgcgaaaaccaaaagcggcagacgggcggtatcgtaccccgtgacgatgtcgatgaggtacttgcccgccacgctgccgaacaggccgaccgtggtaccgagcacgccgagcgcaatatacagcgcgatcattttcttgcagcggcggctgtacgtgagcagccatttccagtccgccaaaacctcactgaactcgcaaaagcgcactttgttttctttacgctccatttggcaccttttcttttcgggcatggcggcgcgcaagcatcgcgataaaaagcggccttaccggtgttaaaacgagccatacggttttgaaaaaccgccacagcgcactgtttcgtccgtaccacttacccttgcggcgcacggcaaggacaaggcagcaaatttgctcgccgtgcacggggccctcggggtcggtctggctgtcgccaaggagataccacccgcttttcgtcacgcgccaaacgcggtgcagaacgtactgcccgtctaaccgccgaaacagcacgatctccccgcgttttggcgggtgcgtgcattttacaagccgcacgacgtcccgcccgtggatgagaaacggcgccatgctgctgccgaacaccggcatttccatcacgccgcccgcttccgtttcggaaaggatcgcgccgatgtacgcgcgcagccccgcagcatctataagcatgcgcgcaggcggacggtctccgccacggtcgcggggtacagcgcctcatacaggcagtcgaccgcttcttccgatatggtacaatccagcaaaaacgccggtacgcggcgcagcagtgcttccacggcatcgagcacacgcgcagattccgcctgatcccagcggttcaccgtcacctgtccgtaaagccgcaaaaatgcctccccgcgcgagagcctgcgcacggcgttctttttcgcctgccgcagcaaaacaatggcgctcagccgcgcatccgcattttggcagatgcccgacgtgccgcagaccggccaaccgcgcgccatccagcaatcctgcaccttctgcaataaagcgcggtcgccgttgatgatctccgccccggcgtattgcgcccagagcgaggcctgcgtgctcttccccgtgccggacggtgccgaaaacaaaatagcccgtccgcggtggcgtatgtaggcgctgtgcagaataaagctgtccttttgcagcatgcggcgctcaagcgcgaaaagcgacgcgaataccgggtcaaacacaaggcagccgcggcagtcttcggcgatcatcacctcggcgtgcgtgtcgtccagctcgcgatacaatgcgtaaaagccaagcatgccctgtatacccaaaagccgcgattccttttctccgtcgcggtacacgatgaggtcttcccgcacggccgtgcacacgccgacggggttcgggatgctctttacaaagcgcagcgtgtagaaatacgcaggctgcacgtctttcgtttcaaaacgcagaaaattcggtggaaaaacgagtgtatcggggtgatctgccgcaaagcagaaaccgcccaacttaaagagcctgtgcatggggtacagtctctcctttcttcaaaatttcgggcgctgtgctttccgcgcacagcaggcggtagagcgtttttgtgtaggcgcatacataaggcggcaccgtgccgaacgcgccgccctcgcgcaaagacgatgccggacacgcgcggcacagcggacgcagcttgcatacgacgcacgcttcattctgtttaagcgccgcagatttctcccgcaccgcacgccaagcggcctgcacgtcgttgtgttcgatcggcacggaaagcgccccgagcatcacgcacgggcgcaaatcgccgcgccagccgacggcaaacgaacactgccctgcaaggcagcgcatgccggcttccgtttccggaacagcgctttccagcgcctgtaccgtgcattgcgcatattcgtgaaaaccggctgtgccaagctttattctcgttgcggcaaggcttgcggccgcggcttcctccggcgagagccgcgcttcatgctgtccgctttctgtggacatcatataggtgtccggctccaactctaaatcttgttcctttgtgatttgaaataacgtttcaaggtcatgccggttttgcctgaccacgctgacaccgaccttcaccggcacgccgtgcgcctgcaaaagctgaatgccgcgcatcgcttttgcgtacccggtctcgtcaccgcacagcgacttgtaggtctctccgcttgcgccgtacagcgtaacgttcacgcggcgcggcggatttttcgcaaaaaatgccgcccagtcttcattcaaaagcgtgccgttcgtgttcaccgtaacgatcataccgagctttcgcaccgcgagatacaccgcgcgaaacgcggggtacaaaagcggctcgccgcccgtgagcagcaaaaacagcgtgcctgcgtcgcgtagcttttccgcaagcgctgtccactcctccgccgtttgcaggcggctgattttctcctgctctgtcctgttcatgcgaacataacacattttgcagtttaagttacaaagtggggtcagctcaaaactgccggtgatgggcacgcccgttttggcggcgcggcgcagtaaaaacgcttccgctgtgtctttctccgggtgcatcacgagtggttcggccgctcgttctgcgtcagcgttgtggtgacatggtaatcgtcaaagttccatacaggtgtcgcatttccgaaccagtccacgacgaatgcgttcttcgccggcatcacggaatcctgcccggtgatggaatactgctgtccgcacgcctcgttatagtactttctgctgtcaatgccgcggtcatacacaccgttgccgttcgagtccaaaaacacctctcccgaaatatcgcacacgcccgtgtagcacgcggcgatgtactcgtttgcctcaaacacctccgtttgcagcattggagcgctccatgcttttttcattttataccgcctttccttccgttttttccgcagcggaagcctcgcgcagcagccctgcgcgcagccctgcccgtacaaagttttctatgccgcgcagcatttctgccggctgcccggtgtactgcgcctctgccgcagccgcggcttctgccaccgtgcacgggtgctgaaactgcatccacaaaaaccgtcccgtttcgttcagcgcggtgatgcggttctgtggcgcgtccgtctccccggcagggatcagcacgtacagcccggcgatctcccgcagcaggtgcctgccgtttacataaaatcttttcatgtcattcggcggcagccctgccgtttccatttccgggcttttcgctttttccgcccgctccatgcttatccctgcctttctgcttcgtggcttcggttataatcataacagaatttttggtattgtcaaccaaatatattttgtagaattcaattgtaattagtaaaaatcaatatatttatgcgtctttttgtcaaaaaaagaagagccatgcaggaaaacggggtgcgatttttccgttttccgcacagctctgagctttatcggtattctgttttcacattgtgatcatgacctgtacgttcgggttcttctctccgacaatcacgatcatttcaatcattttgtttacataatctaaaagcgcaccggaaattttgccgtagtccgtaaactcaatttccgcttccgttttcggcatttccagtgccgcctgcaaagcttccaacgtcggtgcaacgcggcgcagacgcagctccgcgttgatatactcgtgcaaatcgcgaatgtctttcacatccgtcaactttatttctgctcgcatacgcttttccctttcgtgatgtaaatttcgcgcataaagacctcgtcgcgcgcagcggtaatctgtacgcgcacgccggaaagctttttgttcgtgtggcccgtcagcgggttctgcacggcgaacggatcttccagctcgcagatgtgcttattgccgatgcacgtgccctcgaataacgcgtaatccgccttgttttcttcgtcgatgccgagaatgcggaagccctccacgcgctgaccgtgcgtgagatcctcgcgcagcacaacgcagccgatctccaccggcccctcggttttcagctcatacacgggctgcgtgggcgtgccgccgatgcgctccaccgtgcacggaatgcggttttcggtcgtctcgcggatgaggtcgccgagctccttcaagcgcttcacgtcgcgttcatcgaacttgccctcgcgcgtcggcggtacgttaagattcaggcaggcgtttgcgccgcaggaacgcaggtaggtgttgtacagtctctcaagcgaatgcggttcctcgttttcgtgccagaaccagcccggacgaatggacatgtcgatctccgccggtgcgaaaacaagccccttcgagtagaggatgttcggcatggtgccaatctcgcggttcgtgttgtacatgtagctcaaagagccgtcttctgccatcggacccgcgccggtctgcacctcgctgtaaaagcacagctcgctcggcacaacggcccattcggcatggcgcgcctctccggcctcgttgccgcaccaccgggtatccgggccgaaatcattgaaaataacggcgttcggctgatacttgcggatgagctcaaagtaacgtgggaagtcatattcctgctttttgccgtttttgccctcgccgcaggcgttatcgaaccacacgcagaaaatatcgccgtagccggtcaaaagctccgtcagctgattgcagaagtaatcgttatattccggcgtgccgtaatattttgagttgcggtcccacggagaaagataaaagccgaacttgatgccgccgcgcttgcaggcttctgcggcttcacgcacgacgtcccccttataagggctgttttttacgctgtgctccgtgtatttgctcggccacaggcagaagccgtcgtggtgcttcgccgtgaggatgagtcccttgaggcccgcagacttcaccgcttccacccactggtcgcaatcgagcgcggtggggttaaaaatcttctcatcctctgtgccctcgccccattcgcggtccgtgtaggtgtttacaccgtaatgcacaaacgcatagcgttccatctcaaaccaatcaagctgtcgtttagacggcaccacacgtgccgcctctttcaaaaattcaaccatactgtcctcccgaatttcggctttgctgctctgctcgtattatagcacaaccgcgcaaaatgtcaaaaataaaaatgcggcgcagaaagctcgcttccgtaccgcatttaatcgttattttagaacgtgacgcgcaccgtggtgcccttgttcggctcactttcaagcgacacgcgcgcatggtggaacatggcgccgtgctttacaatggaaagcccaagtcccgtgccgccaatctgcttggagcggctcttatccacacggtagaagcgctcgaacacgcgctcgcggtcggccgccggaatgccaatgcccgtatcgctgacctgcatatatgcgtggccgccttccgtgccggtggagatcaccacacggccgccgggacggttgtactttacagcgttatccgcaaggttatacagcatctcgtctaaaatgtacggcacgccggtgacgaacgccgagctgccctgcaccgagatgacaatactgttctgctgcgccgggattttcagacggcaggccacctcctgcgcaatggcgtaaaggtctgtatcggcacggccaagctctaccgcattttcgtcaagctttgaaagcttcaaaatatcctcaacaagcgtgataagccgctgtgcttcggtataaatgttgttcgcaaagcgcggcacatcggcactcttgacgagcccgtccttcataatctccgcataacccgaaatagaagtcagcggcgttttgagctcatgcgaaacgttcgcggtgaactcgcggcgcaggcgctcgttctcttccttttcggtaacgtccagcagcacgatcaccgcgccctgcacgccgttatcgttcgtaacggggttcgcgatgaggctgtaactgcgccccgccagctttgtgatgcgctcgctcgccgtacccgtcagcgcggaatccactgcatcacggaaatcggggctgcggttaaacgccagcacgctctgtgggcggtcgtcctccgggtgcacgtccaaaaggcgcacagcgcttgtgttgtacgaaagcacatcgccctttgcatccaccacaataaagccctcgcgcatgttttcggtgatggcggtaaactccgtctgcttgcggtgcagctcttccattttctccttgatggtctcgttctggcgctgcaagcgcaaaagcagcggcgaaagctcgccgtacacgtcgttttccatcggatggtcaaggtcaatggcgttgaccggcgccacaatctgctttgtgcggtacgtggaaagcaaaatggccagcaccagaataatgacggagcacagcagcatccacggcaccatgcgctcaatggagccgaacaccgtcttcataccgaccgaaaggcgcagcacgcgtccgtccgagagcatcacagcgtagttatacgactgcacattcagcgtatcggattcacgcacggattcccccgcaccgttttctcttgcagcaatgacctccgggcggttgttgtggttttccatgtttgcggcatctgcaacactgtcaaatcgcaccgtgccgtccgtatcgatgacggtcacgcgcacagactgcgcggcggctgtatcatacccggcggagcggatgtcggaaaggtaatcgtccccgccaagggcgatgccgttttgaatgtagcggctttccgctatggtcgcctttttcacgatttccagcgaatcgtagtacgaaacgacgccggaaagcaccatagaaagtaaaatggaaagcagcgcaatgcacgacatgctgaaaatgatctttttcttcatgcgtctttctcctctttaatcctgtgccagccggtagcccacgccgcgcacggtctcaatgagcgtaccggcatcgccgagcttttgccgcagcgtgcggatatgcacgtctaccgtgcgggtctcgccgctgtaattgtaatcccagatcttcgtgagaatctgatcgcgcgaaagcaccacaccgcggttttccagcagatagcacagcagttcaaattctttgtacgtgaggatcacgggttcaccatcaaccgtaacggcgcggcgcttcacgtccactgcaagcgatcccgccgtaaaaagcttatcctccgccgcgggctttgcggccctgcgcagcagcgcacgcacacgggagacaagctccatcatgccgaacggcttcggcatgtaatcgtccgcgccgctgtccagcccaaccacacggtcatattcgctgcttttcgccgtcagcatcatcacgggcaggtcggccgtttccgcacccgcgcgcagacgcttcaaaatatgcagaccgtcttcatccggcagcataatgtcgagcagcacgagctgcggcagctctttttcaagcgcctgccagaaatcggccgcattccggaagccctcggcttcaaaaccggtggtgtgcagtgtatagagtacaagctcgcggatgctgtcgtcgtcctccacaagatagatcataaacccttaaatcctttctgtgcggctttgccgcttaatcgtgctcgccggtgagtgagaacacgacccactccgcaatattgaccgcgtggtcgccgatgcgttcaaaatacttcgccaccatcagcaggtcaaggcatgtctcgccctcctcgggcttttcggcgatgagtgcgatgatctcacttttcaccttgttaaaaagcgcatctacttcgtcgtccgctttttccacggcgcgcgcaatatcaatgtcacggcgcacaaacgaatcgacgctgttcgtcaccattttcacggcagcgcgcgccatttcggcaatgtgcagactgcccggcagcacctctgcgcggatatgctcgaccatttcggcaatatctgaagcctggtcgccgatgcgctccatatctgcgatcatcttcatcgcggcagagatgagacgcaggtctttcgcaacaggctgctgctgtaaaagcaagcgcaggcagattgcttcaatctcgcgctccttgcggtcgatttcctgttccgtttcgtccacggcgcggcgcagcgcttcgtctcgtgtcacaagtacctttgccgcctgcgcaatgccgtcttcgcacagtgcgcccatgcggataagctctgtattgagcagctccagctgctcgtccaaacgatttctcattgtcgtcacgttcctttctgcaagccttaaccgaatctgccggtgatgtaatcctccgtgcgcttatccttcggcatggtgaataagctctccgtctcgccatactcgatgacctcaccgagcaggaagaatgccgttttgtccgagatacgcgccgcctgctgcatgttgtgcgtgaccataacaatagtataatcctttttcagctccaccgcaaggtcttctatcttggaagtggagattgggtcaagggcgctggtcggttcgtccatcagcagcacctccggctccacagccaacgcgcgtgcgatgcacagtctctgctgctgtccgccggaaagccccagtgcgcttttcttcagtctgtctttaagctcgtcccaaatggcggcgtttcttaaagaacgttccacaatgtcatcgagcttcgccttagagcggatgccgtgcgtgcgcggtccgtaggcgatgttgtcgtacacgctcatcggaaacgggttcggcttttggaacaccatgccgatacgttttctcaaaaggttcacgtccatgccgtggtagatgtcctcgccgtccaattttactgcgccggtaatccggcagccctcaacgaggtcgttcatacggttcaaggatttcagcagcgtacttttgccgcagccggaaggcccgatgaatgcggtgatctcgttcggctgaatttccatatggatggatttcagcgcatgaaaatcgccgtaatacaaattcagatcttcgattgccaatttacagctcatatcgtttcccctatctttttctggtgtgattttctaaaaggctcgctttagccctgtttcttcgtaattttcttcgcgacgaacgaggacagtgcgttgatgccgatgacgataacaagcagcacaaccgctgtggcatacgttttgtcgatgtgcaggccctcgctcgaaagcacatacatgtgcacggagagggttcgcacggaatcgaacagaccgccgcccgcctggcccggcatctgcgccacggagcccgcagtgtacatcagcgccgcggattcacccacaacgcggccaatggccaaaatcacgccggacaaaatgcccggcacagcgctcggcagcacgatgtgaaacactgtgcgcagtctgcccgcgccaagcccgaagctgccctcgcggaaggaatccggcaccgagatgagcgcctcctccgttgtgcgcatgatgagcggcaaaatcatgatggcgaccgtaaacgcaccggcaagcagcgaatagccccagtgcagcgccgtcacaaagcacagatagccgaacaggccgtacacgatggacggaatgcccgaaagtgtttcggtcgtgatgcgcacgagctgcacaagcttgttgccgcgctttgcgtattccacagagtagattgccgcgccgatgccgagcggcagtgcaataacgagcgcgatgatcgtcatgacgaccgtagaaatcagcgccggcatcagcgacacgttatccgatgtataggtgaacgagaaaagatccggtgtgatatacgggatgcctttcacaagaatgtaaaagataaggtataaaagcgtcagcatcgtgatgagcgacgcgccgcagacaaacagcagtaagataagcgaaagcggcgagcgcttatacgcgcgcattttatccttgaaggtgagcttgttgatggtctctgccgccacgggtttacaggtacgttccatagtcatttccgtatcctttccgggtcatgccctgtcttttctgcgcagaagcgagaacgtaacgttgatcattaagataaacacgaacagcacgaccgccgtcgcaatgagcgcctcgcggtgcaggtctgtggcatagcccatttccataacgatgttcgccgtcatggtgcgcacgccatcgagcaggccctgcggcatacgcgccttgttgcccgccaccatgacgaccgccatcgtttcgccgatggcacggccgataccgagcaccacacccgccaaaatgccggaacgcgccgccggcaatgtcgcaaagaacacgctgcgctcatggctcgcgccgagcgccagagaaccttcatagtagctgtccggcacggcgcgaatggcactttccgaaacgccgatgattgtcggcaagatcataatgccgagcaaaacggacgctgtcagcatcgtgttgcccgccacgccgaaaatgttctgcacaagcggcaccaaaacaacgagaccgaagaagccgtacacaacggacggcacaccggccatcagctccgttgcaggctttaaaatcttataaagacccttcgggcagaactttgcaagaaaaaccgccgtcagaagtccaatcggcacaccgatgaggattgcgcccgccgtgacgtagaggctgccgaggatcatcggcagaatgccgtagatgtcgttgcccggcttccacttcgtgccgagcagaaatttaaacacgccgatttcaccgatggccggaataccgtttgcaaacagaaacacgcagatcaaaacaacggcaaagatcgatacgcaggctgtgagaaaaaagaggatatgcatgagaagctcttttatgttgctccacttcacggtttgcacgcacctttcaaactttcaaaactactaaaaactgctttattggctttcttgcgaaaagagccggacctttccgcccggctctcctgcgttttatggattgtttcttactgcagctcggaccaatcggtcgtttcgccggtgtagatgctcaaaacctgctcgctcgtaaggccggtcagcgcattttccttgttgacgataacagcgataccgtcctgtgcgatgacagtcggggtaagaccggcttcaagctcgctgtccttcagctcacgggaagccatgccgatgtcatacgcaccgtcgatggtggaggtcatgcccgtagtggagtcgctctgctgcacttcaacggtaacgtccgggttcagcgccatataagcttccttcagtttttccatgaccggcgtaacggaggaggaaccgccgacaacgaccttgccggaaacgccggatgccgcgtaagccggagccgcatcattaacggtgatataaccgttttcggagacaaccttctgaccgtcagcactcatgatgaagttgatgaagtcctgtgcaacttcgcttgcctcgccctttgttgcaatattgaacggacgaacaaccttataggggccggcctttacattctcaacggtcggtgccgcaccgtcgatctccacggcctttacaacgctttcgtcaagggagccgagggagatatagccgatggccttcgggttgccctgtacggtggtcatcataacggaggtgctgttcgtaatctgcgcatcatccgtcgtcatatcttccttttcgccagcgtcgttcttctgctcgatgccgaacagctcgatgaacgcgccgcgtgtgccggagccgtcttcacgggaaagaacggtgatttcgccggtcatgtcgccgccggtcgtttcttcggaggaagcgctctcggaagatgtactttcggaagaagcgctctccgcagatgcagcggaggattcggaggacggtgtctcggaggaagcggagcttgctgcgccgccggagcaagccgtcatagctgtcatggtgagaagtgcggctgcaagaaccgcggtgatctttctgagtttcatacgttactctttcctttcgggagctttctgctcgccttttatcttttcctttggtttacaagcgaaagtatagggccgttttgtaaactcaaaaagaagtcttgtgtaaaatccacgtaaaactgcttaacatttcgggttttacaaagccaaaatcaaaaagaacattgaaaagaagcccgttttgcagtaaaataagcctataaaatgcggaggagttttttatgcgcagcgaaaaagaaatgtatgacctcatcctcggctatgcaaatgccgatgaaaatatccgtgccgtcatcttaaacggttcccgtgcaaacccgaaccgcaagcccgacccgttcaatgattttgacattgtgtacctcgtgcgcgatcttactccgtgcaaggaaaaagcctatcataaagacttcggcgaaattctcgtctgcgagcgcaccgacgaaaacgagctttttgaagagcactttcctgagttcgtgtgctatctgatgcagtttgcggacggcaaccgcatcgacctgaccgtatcgagcatcgaccgctgggaagtatattgttatggcgaccgcctttccgttgtattattagataaagacaacgccctgccgaagctgccggagccgaatgagagcacgcactacgtcaaaaatccgaccgagcgtatgttttttgactgccgcacggagttctggtgggtctcgccgtacgtctccaagggtctgtggcgcggccagctcttgttcgcgcagacgcacatggaaagttgtattcgcaaaatgctgctgcaaatgatgaaatggtacgccggtaccttgcacgggtttgattacagcgccggcaaatgcggtgacgccttaaaagaccttctccccgcagacatctggaacggctaccttgaaaccttcgccgcatgcaccgaagaagacatttggcgcgcactgtttaaggcaggcgagcttttcacggagctcaccaaacgcaccgcaaaagcactcggctttacggtcacggacgaatacgaccgccgcgtcacaagctttttaaaatacacaaaagatttgccgagaaacgccaaaacgctggattttcatattgactaaaagaaaggacccctatatgcagatattatgtatcggcgacgtggtgggcagccacgggtgcgactttctgcgccgcactctccccgccttcaagcgcactaagggcatcgatgtcgtcatcgcaaacggcgaaaactcctcggacggcaacggcatcacccctgcctccgcaaaccacctgctcgatagcggcgtggatatcatcaccaccggaaaccacacctaccgccgccgcgaattttacgattatatcgatgaaagcgactgcgtcatccgccccgcaaacttcccgccggaagccccgggtaaaggcatgaccgtcttagatctcggccgcacgcagatcgccgtcatcaacttaatgggcaatgtataccttgacgagcacctcgcctgcccgttccgcacactcgatactcttttaaaaacgcccgaccttccgaaaatctgcatcgtggattttcacgcggaagccaccggcgaaaagcgcgcattcggctattatgcagacggccgcgtctccgctgtgttcggcacgcacacacacgtgcagacggccgatgaaaccgttctgccgaagggcaccggatacatcaccgacgtcggcatgaccggccccatcaactccgtactcggcgtcagagcggagctcgtcatcaaaaagcagataagcaaaatgcccgtgcggttcgattttgcggacggcccgtgcaagctcgactgcattttgttcgatatcgatgaaaaaacaggcctcacccgcagcacagagcgtttctccctgcgctaaacgtgatttctgtgcggtattacccttgttttttcccgcaaactatggtatagtgtagtttgaaaatacatgcaaatatctatcggaagccggcttttcgccttccgaacgtttttagacaggatgtgtatgcagtgattacaggtaaacagcttcgcgacgcagtcatctccggcgcgaacagcatattgaaaaaccggaaatttgtggatgacctcaacatcttccccgttccggacggcgacacgggcacgaatatgtccatgacgatcggtgcaggcagcgacgccatgcaggcgcttgcggataacgaaacaaccgctaaggtcgcaaaggcggcggcttccgccatgctgcgcggcgcaagaggcaactccggcgttatcctttcccttctgttccgcggcttctcgaagggtctcgaggacaccgtagaagcagacggtacacagctcgcagcggcgctcgccatcggcgtggattccgcttataaagccgttatgaagccgaccgaaggcaccattttgaccgttgcccgcgtggcggcggaaaaaggcgctgcggcagccgagatcgacaacgaccccatttatgtttgggatgccatctgcatgggcgcggcggaagcactggccaccacaccggatcttctccccgttctgaaaaaagcaggcgtcgtcgatgccggcggtcagggtctctgcatgatcttcgatggcatgatgcaggtcttcaagtacggtgagatcgtcaaaaccgacatgaccgaagccgaaaaggccgaggagaccgcccagttctttgcaagcgttgcggcggaatttgacagcgagatcaacttcacctactgcacggagttcatcgtcggccgcgacccggaggtcaccaccgagccgaacgagctgcgcctgttcctcgaaaccctcggcgactgcgttgttgtggtcgatgacgaggagatcatcaaggtgcacgtacacacggaacagccgggtgtggcgctcacaaaagcgctggaattcggttccctgttgaccgtaaaaatcgaaaacatgaaagagcagcacaaaaaagctgccgaactcaataacgcaaaccgcgcggcttacgaagcggcgcaggtcagtaaagaggaaaaggagaccttaaagcccgtttcccccgaagaggaactcggctttatttccgtagcggcaggcgacggtctgcgtgcactctttgaagaactcggctgtgcacaggttgtcagcggcggccagacgatgaaccccagcacggaggacattgtcgaagccgttcttgctaccccggcaaagacggttttcgtactgccgaacaacaaaaacatcatccttgcggcagaacaggccgtgccgctcgtcaccgaccgcaagattatcgtcgtaccgacccgcaccattccgcagggtctctccgcactcttaagctttgacccggatgcttccgcagacgaaaacgcttctgccatgctttctgcagcggaaaacgtcgcgaccggcacggtcacgttcgccgcacgcgattccgaattcggcggcttcaaaatcaaagagggcgacaccatgggcatgacgaacggcaagctcgagtttgtcggcgacacgccggtgcgttccgtctacaaggttgcaaaggcgctgatgaataagcacacctcgtttatcacgctcatttacggcgaaggcatcaccgaggaagaagccaacgaagcactgcgtctcatcaagaacaaggcaggcgacggtgtggacatcaacctcgtaaacggcggccagccggtctactacttcattctttccgtggaataatttcaaagcagcttagggcggggctttatgccctgccctttttcgttttatgtcggaggtttcatggcgtctttatttgaagcggacattgcgtctttaaagggagtcggcccaaagcgtgcggagctgttccgcaagctcggcgcgcccacggtgggcgatctgctgcgtctctatccccgcgcttatgaggattggcgcgacgcggtgcccatccgcaatacactcttaaacgaagtgaatatcgtaaaaggcacagtgctgcgccgtcctgtcgagcagcgtatccgcggcggcatgacgctttacaagacgaccatcacggacggcgaagacgacatgcagctgacatttttcaataaccgctacattacaagtctgctcacggagggcgcggtctacgcgtttcgcggcaaggtgacgggcacgttcatgcgccgcgaaatggcctccccggagttcgttcccgaaagccgcatgcaggacatggtgcctgtttacccgcagacgagcggcctcacctctcgcatcatcgcaaacgcggtaaaagaagccctgcgcctgctccctgagaccgtcaaagacccgttgcccgatgcgcttcgcctgaaatacgcgctgtgccgcctcgaatacgcgctcaaaacgatccactttccgaattcgcccgaagcgctttccacggcgcgcagacgactcgtgttcgaggaactgctcgtcttgcagctcggcatggcggaaatccgccgcgcaggtgtgcgcgaaaatccgtatccgctcaaaaaggattatacaaaagagtttgccgccctgctccccttcacgatgaccggcgcacagcagcgtgccgtgcaggacggcatccgcgacatgcagggtccgcacccgatgaaccgcctcattcagggcgatgtcggcagcggtaaaacagccgtggcggcggcgctgtgccacacggtcattcaaaacggatttcaggcggcgctcatggctcctacggaaattctggcggcgcagcattacgagtccctctccaatctcctcgccctctgcggcatcaaaacggtgctcatcacgggcagcatgcgcgccaaagcaaaacgcgaagccattaagggactcaagaccggcgagattcagcttgccgtcggcacgcacgcactcatcagtgacggcgtggagttctcgtccctcgcgctcgtcatcacggacgagcagcaccgcttcggtgtcaatcagcgcaccgcactcgcgaaaaagggcaacttcccgcacacacttgtcatgagcgccacaccaatcccccgcaccttggcgctgatgatttatggcgacctcgacgtttccgttctaaatgagcttcctccgggtcgtcagcccatcgaaacgtatctcatcgacccgccaaagcgccgccgcgcgttcgggtacatcaaaaagcacatcgacgagggacgacaggcgtacatcgtctgcccgcttatcgaagagggcgaaagcgacgcggcaagcatcgcggcgtatgaaaagatcgtgcgcgattacttcggtgacatgcccatcggcattctgcacggcaaaatgaagccgaaggaaaaggacgccgtcatgaccgattttgcagaaaaccgcacgaaattattattgtccaccacggtcgtcgaggtcggcgtggacgtgccgaatgccgtcatcatgatgattgaaaacgccgagcgctacggcctttcgcagctgcaccagctgcgcgggcgcgtcggccgcggcaaatacgcctccacctgcattctggtgacggaagcacaaaacgatgaaacattacagcgcttaagactcttttgcagcaccacggacggcttcaaggtcgcggacgaagacctgcgcctgcgcggtccgggcgatttcttcggcgagcgccagcacggcctgccgaagctcaaaattgccgatatgttaaacgacatgcagattttgcaggaagcgcagcagtgcgccaaagagctgaccgagcgcgacccggagctcagctcccccgccctgcgcggcctgcgcgccgaaatgcgccggctctttgcatcaaataacggcacagtaaccctataataaaaacaaaacagcttccgttcggagaaatcccaaaacggaagctgtttttttattccatgataagctctttgtcttccggcagcgtaaacggcaccggcttcggctccgtctggtaccaatatgccacagacgtgtagtcgtcgtagcgcgggcccgtccagccgaggttatcaatcgtcattttaaagtcctcatcgaaataaaccgggtctttcacgtgccagcggtacagcataaagcgcttttgatggttatacatttccttcgtgtcgcccaaaatcgcatacaagcccgtataaagcccgctgaacgtctggtagcggttgaggtaaatgtcattgccaaagccatacgagccgccgaagtaatcctccgtgcccgtgtagttcatcgtgggatatgcgtcgccgtcaatgtacattttggcttcaccctccacccagcaggtgttgtgcccgttcatgccggaagccagcgtcacgcccgcaaagcagcccttgccgtgcacgccgtccaagatcacatacgagcgtcccttctgcacagggtgctcctgccgatatgtcgcgtgaaaataaccgctgttttcgggaatctctccataccatccggaaatcatatagaaaagcgtctctggcttttcaccgcgattttccattgtaatacggcagtgttttctgaacggcatttcaaagtagctgttgaacccgcgccccggcgcgacgagcatcgcagctgagttcaaaaccgggtaattgccgtcgcggtcagaaaaattctcgtcatacgcgcaaccgaaaaatgccgaaaacggtgcttccacggacggctgttcattgttttcccagtagattcgcagaataaacgagtgtcccacgtaacccgtgaaccacatgtgcgtcaccatgcccgggccgtccgtgtcacacagcgtaacggtctcgccgggctgaatttgaatgcatggactcagcttttcacagtccttggcgcgtgtgccgccgccttttgtgcctgttggattttctgcggaaaacccaaagtttctgcggttttccattttaaaaagtgtcatgaaaatgcctcctttatttttgttagagtttaatactaagcatttcttcaattgaaccgagtgccgcgcgcccctcataaagtccctcgtcatgtaaggcgagcagcgcgggaacctccgcctttgtgcggctgacgttgagcggctttaacggacgaatgatgaccgccctgcccgctttttcaagcttttcacacaacgccaactggcggttataaatctcatgccgcgtgcgcatcgcttctgccacagcagggtacttgcgaaacgccgctttcaaaaacgccgtgtgcccaaacggttccttttggtagcccttgttgcgcgtcaaaacgatcacatggaacgtgttgccgtctgcaagcgacttttcgattggaatcgggtcgctgatgccgccgtccaagaggtcatagcccatataatgctgaattttcgtgatgagcggcacggagcacgatgcacgcgaagccataaacggcgctttgagcgtgtccttttcaaaccaaacggtcttgccgtccgcacagttcatcgcgccggtcaaaaagcgcgtatcctgctcatgaaacttgtcccagtcgaaaaaaatgtgcttttccggcaccgtgccgaaaatataatcaaagtcgaacatcgtgtgctttgtcaaaagatttcgcgtgctcacatagtcggggttcccgacatagtgttcaatgatctctcggctgcgccccggttggcccgatatgtacgaaagcgcgttcgctgcgcccgccgaaacgccgataatatacggaaacagcagatctttttccatgaacacttccatcacgccgcaactgtaatagccgcgcaggccgccgccctctaaaacgagcgctgtaccctcgggcagtcggcgcgaaagcgtcttgccgggaatcggctgcaatgtataatcggtcacaaatctcaccctctttgtgctcatcatacaatatcaagttaaaaaagtcaaggaggaaagccgcagcttcctccttgcaacaaaacggttcagtttagagtttcaagcatctcttcaagctcctccgggctccaatcttcgccgagcgcaaacacggctttgtgaaacacaaaaagctcgtcttcgcccaactcaccgctttcgagcttgcaaagcatccccggcgcgatttcgatcaaccgttcggtgatggcaaatttctgcttccgcacagcctcccgcgcgttgcgcacagtgccgaaatctaaatcgctcgtgctgccgcacggcatggcgcaatacgcacagtccggcgcaatgcggtttttctccgcgtgggcgcacgccaacatgttctgcaacgccgtttcatcatcctccgcaagcgcggcaaagccctcaaaaagcactctgtccgtttccacggtcttcgcgtttttctgctccgcgcggacaacgcccacaagcgcccccagcagcgcatcccacgtttgatttcccgtcctcattctacgagactgccgtcggtcgcgatgaccttcacctgccacgggataaacttgccgctcgccttcagtgcattcactgccgcgcgctcaaggccgccgcagcacggcacctgcatgcgcacgattgtcaagctcttgatgtcgttctgacggatgatctccgtcagcttttcggtgtaatcgccctcatcgagcttcgggcagccgatgagcacttttcggttgtgcacaaaatcgcggtgaaaatcaccatacgcatacgctgtgcaatccgccgcaatcagcaggttcgcgccgtcaaaatacggggcgcggatcggcgctaatttaatctgcaccggccactggcgcagctcggattcaatcttgccgctgaccgcactgttatccgtatttacgggctttctctcaatagcgcgtgccatgctgcccgggcagccggtgaacttcggcgtgccgagcttttctgccatttcctctgcctctttcttcgcggctttctctgccatagccattttcacggcttcctcgtcaaacgccgccgcttcgcgctccacaaaagagattgcgttcgtgggacatgcaggcaggcagttgccgagaccgtcgcagtaatcgtcgcgcagcagcttcgccttaccgtttacaatgccgatggcgccctcctgacaggcattcgcgcacaggccgcagccgttgcatttttcttcatcaaagtgaacgatggtacggatcatattcaaaattccttccaattcttaaattttgcaaaagccacaaggttttctcttgactttacgaacacagtatactacgattaggctgtaaagtatgttgttataacaacgaagattgaaaaaaggaggctattttacggattacagcatcttagggcgctcgccgctgtttcggggcatccccgcaggcgatttcggcgttttgctcgagcacctaaaaacggaaacgcgcagctataaaaagggcgatctcatctgccacgcaggcgagcacacaaacgcgctcggcatcgtgctcacgggcagcgtgacgatcgaaagcgacgacattttcggcaaccgcagcgtgctcgataaagtcggccccgggcaggtctttgcagagacctacgcctgcgtgccgaacgagccgatgctcgtcaatgtcgccgccgcagaaaactgcaccgttctgtttttgaaaaccgcgcagatcctctccccgtgcgccgtaaactgcgggcaccacggcaagctgattgaaaacctgctgctcgtcagcgcgcagaaaaacctgtcgctttcgcgccgcattttccacaccgcaccgaaaacgatacgcgggcgactcatttcatacctgtcgtttcaggccatccgcgaaaacagcgacagcttcacaatcccgttcaatcgccagcagcttgcggattacctcagcgtagaccgcagcgcactttccaaagaaatgggcaaaatgcgcgacgaaggcattttaaacttctccaaaaatcattttgaactaaagcgcacaagctgacgaaaagcgagacgaataaagtctttgttcaaacttttttcaaaaagttggtgggggctcggggcaaagccctgagtcgactttcgcaaaagtcgaaacaccctttgcctaactaagatcaggaaaataggcgcaacaatccggtgaattgttgcgccgcaagaaaccctatcaagggggttcttgaaaggcggtcaaaaccgcctttagaaatacacactccattactctattatagaaaggacttatcttcatgaaaaacattttcttccgcaccacgtctctttgggcgtccgtcctttacatggcgctcggccttgtgctcacgttttggccgggcatgtccggcaccgtcttttgctggggcatcgccgctgcactcattttgtacgccgcacatagcttctggtattttataaaagccagaaacctcggcttcactgcaggcggcacgctcgtcatcggcattctctgccttgcgttcggtattttctgcttttcccgcccgtacgtcgtcctctctttcctgcccatcgcgctcggcatcatgctgcttgtagacggcatcggaaaaatgccgctcgccgttgatgccctctcggtgtacagcccctaccgcttctgggtactcatctccgccgtactgccgctcattctcggcatcgtgctgctcgtaaatccgttccgtgccgcaaaagccgccatcatgttcttcggcatcagcattttagcagacggtctctttgagctcatcacctacatccagcagcgccgcgcagaaaaatccgagtacaaggacatccgctaaacaacctttttgcaataacaggcaacatataccgtatgaccgaacgtacgtcgcgaagacgagcatcgcacaactgcaataaacgaagcaccgtgtccttgtgcggcacggtgcttttgttttgactatattcgtttacttcgtaattttcagctcgccgttccagaccttgctgccgctttcctcaacgtaaagctctactttactctcttccggcgcaaactgcattttgcggttccagatgctcagtgcgtcacagtcaagcttcagttctaccgtcttcttttcgccgggctggagatacaccttctcaaatgctttcagctcgcgcacgcggcggacgattgtgccgctcacgccctgaatgtacagctgcaccgtcgcatggcccgctgtgctgccggtgttttccacctcgcacgtcacggtatgcgcttttccgttttcaagcgtcgcaatagaaatttccggcgtgccgtcctttacggtcgtcttgaacgtcgtgtagtgcaaaccgaagccgaacgggtacagcggcgtgttctccaaatcacggtaacgcatcatgtcgtaggaagcgcgggcgttgtagtacaccggcagttgtcccgttgtgcgcggcacagaaaccggcaggcagccgcacggatctgccgcgccgctcaaaacttccgcaatggccgtgccgccccacgggcccggatagaacgaccacagcaccgcatcgctcttttccgcaatctcggggatagcatgcgggcggccggaaatgagcaccgttacgaccggcttgccgctttcaaacacggcattcgccaactcgttctgcgcgcccggcagacgcacatcagaggtatccacgccctcgccgcaatccatctgcaatttcgtaccgacgattgccgcgccgttcgtgtcaaactccgcgcccgcaaagcggcttgaagaaccgcccagcgccaaaatgacgaggtcgctctcctccgcaagcttctccgcctccgcaataccggaagtatcgtcgtcgcagatcgtgcagccgagcgcatagcgtacatcggcgttcttaaattcgttccgaatgccgtcaagcaccgtcacacccacaccgtcacgcagcggcggtgtgtagtcgccaagctgctgatacagcgcgtctgcgttcgggccaatgaccgcaatacgcagcttcttctcttttttcagcggcagaacaccgtcgtttttgagcagcactgccgactgccgcgcaatttcaaggctctgcggaaacgttttcggcacattgtattccgtcagcggtttttcttcaaggtacgggtgctcaaacaacccgcgcgcaaatttcagctccagtacgcgaagaaccgccttgtcgagcgtttcttcggaaacgagcccgcgctccacggcttcttccagatgcgggaagctgtcgtcccacaggctcacgtccacgcctgcatttaaagcatacgcgccgtttgccgccttgtcgttacccgtcagcataccgagacggtcaatcgctacgccgtccgccatcacgatgccgtcaaagccaagctcctcgcgcagcacgtcctttaaaagccactcattcgcatggcacggcacaccgtcaatctcattatatgctgccatcacacccgtcgcgcccgctttcacggcctccttcatcgcgggcagatgaatttcgcgcagttcgcgctcgccgatgcgcgccgcactggcgtttacgccgccggtcgtttcgccctgtgcgcagaagtgcttcgcaacaacctccaaaccggcgctcgcacagcccttcaccgccgcagcagcgttctgaccgcagaggtacggatcttcgccgtagcactcttcgcttctgccccagcgcgggtcacgcagaatgtccagcatggaaacgagcgcaaaatccacgcccatttctttttgctgctcgccaacgaccttaaagccctcttcaacgagcttcgggttccacgctgcgcccatgccgaggttcaccggcagcaaatagccgtcgagcgcctggtggccgtgcgggcactcgctgctcatcagcatcggaatgccgaagcgagagtgctccagtacatagtgctgcgccagattataggcgcggattgcgttcacgccggtaaggccggtcgtataatccttattcgcccacgggtctgcgcggtataagccgtaaagcacaccgaggccgccccatttttctacttcttctttaaagctgtccgcaagctccacgtgctcgccgttgcaggtgtagctctgaaagccgtaaagcttctgattcacctgaccgaccttttcgcgcagcgtcaggcgcggcagcaggtcttccgcacgctctttcggggaaagtgcactgtctttaaatttttctttcatttttattgtcctctccattgaaactgtcaaccgatacaaaactcagttgtgcgtacatgttaaagcatagcacacctttgcacggttgacaaggaagaaaatcaaacgaatttttcgtacagctttcacggaatttcatcactttcctttttgcatatcctgtgttatactataaaaaagcatccatgaccgaaggagcacccctatgaatccaaaaaaatttcccatgcccaccggcatgctcttaaaaaccgacgacgaagaaaaattccttccgtttcaaaatccaactacctataaagacatcaccgtcgagttaaagccgaacggcgaagctctgcgcgtatacgtcaccgctgacacatcgcccgtgcagcgcgtcacgctctatttcgcggacccgctgcccgaaaaagcgcaggttttaggcggtgtttgggagcgcggctacggcgactatgaatggcgcggttatgtcccccatcgcgtcatgccgtggtacttcttcctgcagagcggcaacaagaccgaagccttcggcgtgcacacgcagcccgctgccatgtgctggtggacagccgaaagcaccgggtacagcgtatatctcgacgtgcgctgcggcggtctcggcgtgcgcttaaacggccgcaccctctgcgctgcggagctttgccgcgcagaatacgaagacgccgacggctttactgccatgggtgaatttttctccgttttgagcccgaaccccattctgccgaaatcccccgtctacggcgcgaataactggtaccatgcctacgggcatgccacggaagatgacgttctgcgcgaagcgaaggccctcgccgaactcaccgaggggctcgcaaaccgcccgtggttcatcatcgacgactgctggcaaattgaccgtgcggataactacaacggcggcccgtggcgcgcgggcaacaagggctttccggacatgccggacctcgccaaaaagctgcgcgaatccggcatacagccgggcatctgggtacgtttattatgggatcacagcgaaagtattcccgcctcttggcgctcgaagcgtgaccccgaatacctcgacccctccgtgcccgaagtgctcgaccacatcgcggaggacatccacaccgtctcaagctggggttacaagctcatcaagcacgatttcacttcctacgacgtactcggccgttggggctttgaaatgggcgacgagctcacggacagcggttggcgctttgcggacgagacccgcacgacggccgaaattttaattgaattatataaacgcatcttagctgccgcgggtgacgccatagtcatgggctgcaactgtttcggccaccttggcgctgggctcatgcacctcaatcgcaccggcgatgacgtcagcggcaagctctgggcacgtacgcgccgcatgggcatgaacacattggcattcaccgcgccgatgcacgaccgcttcttcgccattgatgccgactgcgtaccgctcaccgatgccatcgatgaaacgctcggcatgcgctggctggagcttgtggcaaaaagcggcacacccacgctgctctccgttccggcttcctatttaaacggcgagcgcaaagccatcatccgcgacgctttccgccgcgcaagtcagccccagcccaccgcgcgcccgctcgattggcacgagaccacctgtcccgccgtgtggaagctcggcgaggaaacgaaacactttgactggacagagccgtgcggcattctgaccggcagcatttaaaggaactttcatgaacaaatcagacagaacggcttttttacctgtttcaaaagaagatatggcggtacgcggcatcgaacagctcgatttcgtgtacatcagcggcgatgcctacgtcgaccacccgtcgttcggcacagcgatcatctcccgcattctcgaagcaaacggtttcacggtcggcattatcgcacagccgaactggcgcgaccccgaaagcgtgtgcacactcggcgagccaaaacttggctttctcgtttccgccggcaatatggattccatggtgaaccactattccgtcgccaaaaagcgccgccgcagcgactttttctcccccggcggcaaaatgggcctgcgcccggattacgccgtcatcgtatattccaacctcatccgccgcacgtttaagaaaacgcccatcatcatcggcggcatcgaggccagcctgcgccgccttgcgcattatgattactggtcggacaaaatgaagcgctccgtcctgctcgattccggcgcggatatcatttcctatggcatgggcgagcgctccatcgtcgagattgccgaagccctgcgcagcggcatccccgtgcaggagctcacgttcatccgcggcaccgtgtataaaacgcacatcgcgcccgacggcgacgacgtgctccatctccccggcttcgataagatttccaccagtaaagagctgtacgcgaaaagcttttacaatcagtatctcaacaccgacccgttcacggcgaaaacgctcgtcgagccctacccggacgaccacctgttcgtcgtgcagaatcctccgcagatgccgctttcgaccgaagaaatggatgacacctacgccctgccctatacgcgcacctatcacccggattacgaagccctcggcggcatccccgccattgaagaagtgaaattcagtcttgccagctgccgcgggtgcttcggcgcatgcagcttctgcgcgctgacgttccaccagggccgcatcattcagtcccgcagccacgaatcgcttttggaagaagcgaaaaaaatgaccgaggatcccgattttaaaggctacattcatgacgtcggcggccccacggcaaacttccgcaagcccgcctgcaaaaagcagatgaaggtcggcgtgtgtaaaaaccgccaatgtctgttcccggagccatgccccaacatggagatcgaccatacggattacgtttccctcctgcgcaagctgcgcgcattgcccaaagtgaaaaaggtctttgtgcgctccggcattcggttcgattacctcatcaatgacaaagacgaaacgttcttccgcgagcttgttaaataccacgtcagcggccagcttaaagtcgcaccggagcatatttccgacggcgtgctgcgcatgatgggtaagccgcagaattccgtctatcgccgcttcgtcaagcgctacaaagagctgaacgaagaaatgcacctcaaccagtacctcgtgccgtacctcatgtcctcgcatcccggctccaccttacaggacgccgtaaagctcgcggaatatctgcgcgacctcggctatatgccggagcaggtgcaggacttctaccccaccccgtccacgatctcgacctgcatgtactacacggggctcgacccgcgcacaatgaagcctgtatacgtcgcgcgcgacccgcacgaaaaagcgatgcagcgcgcgctcatccagtaccgtgacccgaaaaattacgacctcgtcacagaagcgctcatcaaagcgaatcgccgcgacctcattggcacaggcaaaaactgccttttgcgcccccgccacggcgatacccgttttgctcccccaaagcccgccgcaaacagcaataaaccgtttgacggtaaaaacaaaaacggcgcaaagcacggcagaacgagtcaaccgccggcgccccaaagccgccgttggacaggcgagccgcccaaaaagcgcggcaaacgataatgtgagacagcaaaaagctctgcaccgaatttcaggcgcagagcttttgtcattgctttatgatttaatacaaacccggcttgcagagaatctcgtgaattttcgtgtcaaggcagtctgccgtatatgccggcgtgatgatacacgcggtgtccgcaccacgcgccgagccgcccacacagacaaccggcttattaagctcaatcgcgccgttatccagcgccatcatggcgatctccacgcaaaccttcgtgccctgtccgaacatgcgcagcgtgtgcgccatgatctccaccgggtacgcgccgctgaatttacgactgatgccgcgttccgcaccgctcaaagcgtgcgcggcatgaatgatatgcacaccggctgcggtcaactccgcgcgccgctcgtccgtcatggtgttcacgccctgcttcgggtagccgtacgcctgccccaccatgaccatcggcacatttgtcccgatctcttcctgcattttaatgagttctataagcgtgtcgcccgcgctcgaagccaccacaagcgtcgttccgcgctccttcgcagcgtttaaagcaatgtgcagcgtctccaaggtattctctttgcctttattttcaaaaatcatttttatttacctcgtcagtcatttcgggtcttccaaaatcgcgtagctcacaaatgcaaaccgcatgctgtctccggcccaggagttcacgttgatcgaaccttgcccgccaaacagcgacagaatcttgtgctgattttcgccgtccgcatccatcagccacagctccaccggcatgttcggcaggtgctcgtgcggctccagctgctccgggccgtaggaaatgtagaccacccgttttccgtccggtgatacatgcgggaaccagttgttccgccggttttcggtgatctgcgtctgctctccgccgtcccgctccatgcgccaaacctgcatcaagccggagtttgtagcgttataccaaatgtactttccgtccggggaatactccgggccgtcgttaaagccaccctttgtcagtcgcttttccgcgccgccgttcaccgggatcgtgtacacgtccacttcctgcctgccgtcgatgtcgcggaaagcgcagcaagcttttccaaaacctcgccctgcatgttgttgagcgggccgtaaagctgcacaccaaatttcatgctttcaactcccccagattataatggaatcttacgcctccggcgtgtggtcgtattcaaatccgcacttcgagagccattccttcgccatcagcgtcgcgccgatctggttcgggtgcacgcggtcccatgcgatgagcgaagagtgtttatactgcaaaaacttgtcatacaccgcttggaagtttacaaaacggcagccgtattcctcggcaagacgctcgcagatgcccacatattcctgcattctggcacgcataaagtcgctcttgttcgtctccatgtagtacggcgtgcagacgataatgcccttcgcaaccattttcgcctgttcaatcatcgtgcgcaggttttcttcatattccaccgggtcgaccgcctgatcggtgagcgccggagaatcaaactgccgccacacatcattgatgccgatgcagatagacacccactgcgggttcaaggaaagcacgtcgcgctcatagcgcgcaagcaggtctttcgacgtattgccgctgatgccggagttcgtaaaacgaatgctcagctccgggtaagtcgccgtcacaaggctctcgatgacgcgcggatagccgtgacccatgttgtcaaacaagccctcgcccaccggctgtgcgctgcccatatccgttacggaatcccctgcaaaaataatgcgatccatattttcaaaaatcatggtaaactccccctaaaagagtaaatttctggttatattataatcggatttctacaatattacaagggcactgtgcaaaatacctaccacgttgacaaaggcccgcagctgacgcaaaatgtgaaatgaaataaatctcacgcgccgcagcgcatttcacaacaaccgtaggttgttttttcactataccgaaggtatatttcacaaatcccgaaggaatttatttcacagaaaaaaggactttgcaaaatgcaaagtccttttttctggtggaggagggtggattcgaaccaccgaagcaagaagcagcagatttacagtctgtcccctttggccactcgggaactcctccatatacagagctgcgtaaacgcaaactcatattataaaaacagaaacaagttctgtttattgctgccaagcaaaacactcggaaacaatatatagaaacgaaaacaaaatgttctcgattttaatcaactggagctggcgaacggacgaagccgcttgcgcgtcttcacggcttacagcatagctgctacgccgcttccggctaaaaactttccaccggaaagttttcttaacgccgaaaccctttcagggttcgagtccgtaccgaactcaataaatatatagaaaagcgaaaacaaaatgttctcagttttaatcaattggagctggtgaacggactcgaacccctgacctgctgattacaaatcagctgctctaccaactgagctacaccagcgcatagcgcgtaaaaacgcgcttggtgacccatcggagattcgaactccggacaccttgattaaaagtcaagtgctctgccaactgagctaatgagtcatacagctttaatattatagcaatttcgcgccgttctgtcaactctaaaatgaaaaaatttgaaaatttcctttttctccgcaaaaccgcagaaacataaggaaactgcccggcaaaagccgggccttcccatcaaaattatttgtgctccgtaaagaaatcattcacaatgtcgctcacgtcatagtgcacaaacgggcccaaaccgctgttgacatcgattgtatatcggcaatcggtttccgtataggcgtcgataaagtagttttctacgatctcaatgtaatttttcacaccgtctctttcagcggcttcatcatctgtgcgcacatagacgctctcgtcagacaaaagatatatgaagacaagctctcttgtctgacccggctccaacagaatattcccggtcttgttcgggtcttccgcattcatcagaacttctgcaatgccgttgatcagctctcgcttgtcggtcgtgcactcggacatatccaaagggcagccgtctgtgtcatactgtcccatgtcgtatactccggaaaggaatcccgtcgcttcatctccggtgttctcaaagccgattgtgacatacgcaaacgcataatgcggcgaagaaagcgtgccgtcttcgttcagcttgcaggtctccagccacgggtaaccaccatttatccaccacggaacaaagcagtcgttatccgctggcgtaagaccatattcaagtttattggacatatgcacgtctttgatcgtggctttcacatttttaccgccgtaaatgctcgatgcagaaaagtacgggtcattctctgcatcaaaactgccgtcgccgttttcaattgaaatgctcccgtcttccgtgcgaacgattttcggtatcttggagaaatccagtttttcatccgctgtaaaatgcgattcaaattcttctttcgcagaagatacctccgccgtttcagatacttcggaaacttcgggatttccagagatctccggcacctccgctttgctttcttccgaaactactgcttcattccccggtgcctccgtgacctccacgccgccggagaccgcctccgcctgcacacgcggcaaatttgcaacgccaaaggccacgccgctgacgcacgcaactaccaacacaccacaccagattttcgtccttaacgtccgtttcataaccaatgctcctttcggttttgtgtaacctttctacgcccagagcataccacacccgccccgctgtttcaatataaaccgtacagtttttgcagttcctttgcaatacttttgcaagtttttccgcacacagaaaaagagccccgcaaaacgcgaggcccataaacctttatattttatctatcaatcttttccatcacttccgtgaggctcaacccgtttttctcggcgagcgccgccaggtcatcgtgctcaaacttcgcgcgctgcacgccgtagccggaagacaacttgcggcgcaccgggccgagggcggtctccaccgtctcctccgtgcgggtcagcacatagcggcggcacagcgtctcgcggatgccgatggtcgccgtgtgtttgaaaatcgcctgcacaacggcctccttctgcgcctcgcggcacagcaccgtcagcagcgtgccggggcggttttttttcatcataacggcggtcgtgaagacctccaccgcgcccgcctcgcgaatcttctccgccgcaaagccaatcgtctcggcggtcatatcgtcgatgttgcagttcagctcgtaaacggagtccgcgccgtcgccggtttcgcccagcatcgcgcgcacacagtttgccacttcaaagtccttcttgcccatgccgtaacccacgcgctgcacgcgcataaccggcatatcgccgaacgctgccgcaaagtgcttcagcaaagccgcgcccgtcggcgtgcagagctcaccctgaatgcgcccgccgtagatcggcacgtcgcgcagaatatacgccgtggccggggccggaacaggcagcacaccgtgtgcacagcgcacctttcccgcgcctacatgcaccggtgacgcaacaatcttctccggtgcaagcttgcggatgagcaagcacgccgccgtaatgtccgccaccgcgtccattgtgccgacttcatgaaagtggatctccgaaaccggcatgccgtgcgcatggctctccgcctccgcaatgagcttatacaccgcaatcacgtctgcacgcaccgcattctccaacggcagatgcccgatgatatgctcgatatccgccatgctgctgtggtggtgatgcccgtggtcgtgttcatgctcatgcgtatgttcgtgatcgtggtcgtggtgatgctcatgttcgtgtacatggtcgtgagcgtgatgttcgtggtcgtgcacgtcagcgctttcttcctcctcgccgttcaccgtaacggaaagatgcgtgccgttgatgccgcatttcgtgctcacttccgccttaaattccacaccggggataccgagcgcgttcagctcgtcgagcactgcctgtttgtcgtcaaacagttctaaaagcgccgccgaaagcatgtcgcccgccgcacccatgccgcagtcaaaatacaaagtcttcatgcaaattcctcctaaaatcaaaaaggcgcacgaaccccatacagtccgcgcgcctccgctggcacaatttaatcctataaaaacaagatccggcgcttcaacgccctcgcagcttcctgccgcaataaatacagtataccgccccaaagcgatgatgtcaagccaaaccagaaccgcaaagtctttcccccgcgaaaaaacacaaattttcgcaaaaacagggttgacttttgcacaccgatgtattataataacgattgtctcaagcgagcagtgtgttcgccttgcaacaaacgggtttcccgtttttataatatgagtttgcgtttacgcaactctgtatatggaggagttcccgagtggccaaaggggacagactgtaaatctgctgcttctagcttcggtggttcgaatccaccctcctccaccatctggggtggacactttagatgtccaccccgtttttgtcagtattcatgcgggtttgcgggctttttagagcgcaaaatccaaaatgattttccatagatgccttttccataaaatggcaatatcaagatttttcgtgagcagatgcggggcttccgcctgaaaattcaggccggaggccccgcttttttgcgtttaccacccttttttcccgttgtcggaaatgcagaagtttccggcagtttcatagatagattgacgaatccctaaaacgggccaattttaagccctcaagatacaagggggtagtgcgcccttttttagaacctctccggcaggccgccagggaggtttttcgcagcgatttttcgctttccccctctcccacaccctcaccccctaattacttaccagctgggaaagaacaagcatttctttccagcaagcatactctaagcccccaaacaaagccctcaagttttcaacaaccgtcaagaaaggatgagcaaaaccatgaacatcggcatagaccacggctattacgccatcaaaacccggcatttttctttcccagccggtatctcagaatattcccacgagccctacaccctgcagaacacgctggagtacggcgggaagtttttcgtgtgcgggacgggcaggcagcccatcctgcgaaacaagatggagaacgacaactactacctgcttacccttgccgctatcgccaaagagattaaacagcgcggagaaaaggctgagtgttccgtaaacctcgcagcagggctgcctctggccggatttggccgtgagaaaaagcccttccgggaataccttctccgttcttcccagccggtgtgcttcaaatttgagggaatcccctacaaagtaaccatcgaggatgtgaaactgttcccacaggggtattccgccatcgccatccatcctgaacttatccaaaacgaaccttctgttctgctcatggatatcggcggctggacggtggatctcatgcggctggacaacggcgtcccgaacgcttcaacctgccgcagcttggagctcggcatgatccgttgcatcgacgaaacgaaagaacagatccgccgggatgtagggctgtccgttaccgacgcccaagtagagcgcgtgctggctggaaaagcctgcagcatggacgaggacgcccgaagcatcatccaaaagcagggccgcctctacaccgaacggcttctctcggcagccatggaatcggggtttgacctgaaagccatcccggtaatcatgctgggcgggggcgcggcagtggttaaaggcaatgtgagcgaacaggacggcctgtgccgggttttcgccctgatagacgaccgtgtgaacgccgaaggattcgagcggatttttgggcatttgtcgggcggtgtgagcaagggatgaacaggcccctattcgggtttcgccccaacctccagaatgaacgccaccgcagggcttgggaaatcctgcaggctgtgccggacgggcagaaaaacgcctttctggtgcaggctattttggagagccaagaaaaggaaacctttgaaactaccctgcggcgggtactgcgggaagaacttcaagctgtcccttcccagcctgtgaagcagccggaggaagccatcccgcaggagatgatgggcttcctcggttccttgctgggagaagattaactctgtttaaaacgaaaggaaccgacttatgagaaaagaaatctacaaaatcaaaaaccccaagcatattgtgtttggcgatcccctgtatttcgaggatttcaaaggggccgagctcaaacgcctcaccgtggattacaaaccgcccaaatccttcgatgcggcccggcttgtcctgctggagaagccgaatgagaaataccccgaatacacagaccggacaatgacgctttaccttgccccaaggcagaccatagacatttatgccgatgagaagatctacgccttccaaaaaatagatggcaaatccatcggcgtagataccgcccgctattacctcagcattgacgggcgcgacgatataatcaggaccggcgcggatggctggtggggcagctttgaggaatactatcgggaaaacggaaaaggccgcatttcagacgccgttgtcctgacggttgcaataccggaagaacaggattttaactggatgaagcagatggccggatatttctttgaggatatgcagccggtcacccccaaaaagcaaaagaaaatggatgggccaagccgctgaaaaccccaaacatagcccttgttggttgtgacgtttgtcagccctgctttggctgaaaggttgttgctcttggtgatagctttatcaggcgggttgcagtatgcttgtgttgcccgaaagggaaagaaaagaaaaaggagcgacagagcatggaaaccaagggcatcacctgcaaaatcccattagacctgcacaatcgcatcagcgaggaaatcagggaaacagaaagcacaatcagcaaattcatcgaaatggtcattatggagcactatgagaaaggggctgtcaaagtcatggaaaaaggaagaacattagcgtttcaggtgagcgaggaattgttccagagggtaaaggaataccttgaaaactacgagaaaaactaccaccgccgccttacccaaaaggaattcgtgatcagtttgatcgaacaggcgctggaagaagcggaagaagaattcgaagccgccagagccgcccaagaggaagcacgggccaatcggtttaatcctctgaccggatcattttatggagaagccgatgatacagaagcagaaaatccggcagagagtttggaaatcaacgagggcgaggaaatccccgcagagggagatgacagcgacgagaactgccccgacgaggatgatgaggacgtcatgccggaaagctgggagcaggacgatgacgaggaagaagaagccgagcctgccgacgaatcccctgaagatgaagaaaccgaagaataaccttaccaacaacacccccacaggactgaggtaccgcctcagccgcctgcgggggtgttttcatatagatttcagttcacgaaaaaggggcgatgtccattgattgtgctttaacgattcatcaaatccctcaaaaggagcgtgatatagaaaaccatacgatatattgacctgttctccggcatcggcgggttccgggaagggctcgcccgcgccggagggtttacctgcgtaggccattgcgaaatcgacgaaaaggcaaaccaaagctatgaagccctgttcgatacaaaaggagagtggttttgtgaagatatccgaaaagccgatccaaacggcatccccgacttcgacctgctgtgcggcggatttccctgccagtctttttcgattgctggacaccgtggaggattcgacgatccaagaggtaccctgttctttgaaattgcccggctgactgcggcaaaaagacctgcgtatctgctgcttgaaaatgttcccggactgcttaaccatgacgggggcaggacatttgcggccatcctccatgcgctggacggattggggtatggtctggaatggcaggtgctcaacagcaaggatttcggagtcccccaatcccgaaaaagggtgtaccttatcggatatcttaataaaagatgcagaggaaaagtatttcctttcaccgaaacagcaggcacatctcttatacaaatccgccccggcgcgcagggagagcgagtctactccccggaaggggtaagctgcaccctcgcggcgcagacgggcggattcggcgggaaaaccggtttgtatgaggtgggcctgcccatcagggagaatacaaaaaaggggtacaaaatggcgtatcccggcgacagcatcaatctggcgtttgctcagaaaaatacccggcgcggcagggttggacgaaaaatcgcccataccctcaccgccagcagcgaccaaggcaccttggagccgctcaagcgcatccgccgcctgacgccaagggaatgcctgcggctgcagggatgggcagatgaacggattgatatcgttttgcctctccaatccgacgcccagctatacaagcaggcaggaaacggcgtgaccgttacagtggtggaagccatcgggaaacggcttgccgccgcccatcgggaggtgaccgccatcgattgatttaaaagaccaatacttcggctgcgagattgagatgacggggctaacccgccagaaagcagcggaagcggtggcttccctgttcggtaccatggcccgccagacacatgaatcccgcacctacgatccgtgggaggttatagacaacgagggcaaaaagtggcggtttgtctacgactccagcatccatgcttctcatcggatcgggcggcagcagcttcccataagcgatggcacctacaaggtggagatgaattcccccaagctggaatacagcgaaatgggaaagctgcaggaggttgtccgcgccctgcgccatgcgggggctgtcgtgaacggaagctgcgggatgcacgtccatgtggacgcctccaagcataccccacagagcctgaaaaacgccctctccatcatgtattccaaagaggacatcctgttcaaagccctcaatgtcaatgaacaccgggtggaacgctggtgccagaaggtgcgggaacccatgctggaaaaaatccgcaagcttcccaccaataccaccatggaacgcctcaagcgggaatggtacggcgggcgggatgaaagctacgaacattacaactggacgagatattacgccctgaacctgcattcggtgttctatcgcagcaccttggaatggcgctgttttgaaagcaccctccatgcaggaaaagtcagggcaaatatcacgctggcgctggccatctccgcgctggccatcaaccagagccggacggtgatgcggaaaaccgagatcagcgaaaaccccgcctttaccttccgcaccttccttttacggctgggcctcatcgggccggaatacaaaaatgtgcgggaacatctgctctcgaacctccccggcgaccgggcatggcggtatgacaaagcccaataccccagcctgcaaaaccgccgaaaccaagaacgataacactggaggtgatgaaaaccgaaaatttcaaaaagccaactggtacactgctgtattttgcctatggaagcaatatgaacctaaaccagatggccttccgctgccccgatgcggaagtggtggataccgtccggctggaagggtaccgccttgccttttgcatgaacggcggcgggaatggcgtcgccactatcctgccggaagaaggaagctatgtggacggtgtcctctggcggatctccgaacgggatgaacggcatctggaccattacgagggctttccctacctgtacgggaaagaacctgttgtggtaatagatcaggatgggatcaggcatgaaatcatggcttacaccatgaacagcccgtacaaggatacccccgccatgccctccaaagcctatctggaaggaatcctgaacggctgccggcagaacgggatcgaaaccgcccctgttctggaagcggtccggctcactcagaaggaactgccaaaaaaagaaatcccccataaaaaacaccaccgccggaaacacggcgaagaacgataatctgaacactggcccccgtgggatggagaattttctctccatcctgcgggggcctttttgtattttacgaataaggagaatcgcatgaaaaaacatctaaaacggctgctgtccctgatgatggcggtactgctctgtattggcgttatgccaagcagcgcctttgccgcctcctacgattacgacgggtacatctccatgatcgaccataacaccagagggtattccctcagttccaatcttcccgccccgtttggcggctacagttccaataagttcaccgagctgcggatcaacgacctgaaagccttccgcactgcctactgcatccagttcagtgtaggcgtacacacgggtatcggttatgaccagtcggacgattacgccgcttttaccgccgagcagaaatccatgatcaacaccgccctgaccttgggctacaacgtggaaaccggaacaaaatacggcggcagcgccatcgacgagtacattgccacccaaatcctcatctggctgattgcccacgagcaattggggaccgggtacgaaacgcagatcgtcaatgaatttaccgtcaacagccccgccgcgaagcccatcttctatcagcttcgggagaacgtcgtgaattaccacaccatcccgtcctttgccaccgatgatccaagcgcggtcggggcatatacccacgccctcaaatacaacgagagcaatgggaaaaacgaaaccacgctggtggatgagaacaatgtgctggggaatttcgctgtcagctatccgggcgtggatttttccgtcagtggcaatgaactgcacgtctccacctccgaaaccgaattcggtaccattaccgccgaaaagcggctgccttcctctgttcccggcgtggtcacaggcggcacgaaatactggctgcgggacgaataccagaacgtggtcaccttcgatgtggaaggctccgccgagccggtgaaatgctgcttttcccttgaaatcaaggcaggcgccctgcagcttgtgaaaacctccgaggatggcaaggtcgagggaatcccgttccacatctccggcaacggcgtcgaaaaagacgtggtaacggggccggatggcaccattaaggtggataacctccaagctggaaactacaccgtaaccgaaaaggccccggacaaatacgtccagcctgcttcccagcaggtgaccatctaccccggccagacctccagcgtgagcttttccaatatcctgaagaaattcaccgtggagatggagaaaaaagattccggccataacaagccgagaagtaccgaatatgaagcgcagggcgacgccactttggatggcgctgtgtacgggctgttcaaaggcgaaaccctgctggatacctacaccacggcgaacgggggcaaatttaccaccaaggaatacccctgcggaccggattacagcatccgtgaaatttcccccagcgaggggtacctgctggacgaaaccgtctacccggtaggcgcggaaccgggcaatttcaccttggagaacaacagcatccccatgactgccacagaggacgtcattctcggcagcatcgccatcaccaagcatacggatcagcctgccaccccggaacaggaagaaccggtcccgcagtcggaagcgcccgactccagttcttcggaaatcccggaatccacccctgtgccggaagatgaagctgcttcctccagccagccggaagcaagcgcggaatccgaagccccggcagagcctgccggggaaccgtcctctgaaagcagccccgcgccggaaagcgagccggagcctgccccaagcgcatcaattgtgccgcagcttgtccctgcggttgccagccttgcctccaaagcctctgttcttcctttgtccaccacgtcctccagcgatgaagtgcagatcgagcagccggaggaaggcgcggagtttcaggtttaccttgccagtgcaggcagctatgggaacgccaaggaaaccgagcgtgaccttttaatcaccgattcctatggttttgcccggtcaaaggatcttccatacggcctgtatgtggtgcatcaaaccgcaggggctgaggggcagaaatttgtccccgacttctctgtgttcatttccaagcatggcaaaacctactattatattctgaataaccccacctttacttccctcatccggtttgagaaaaaggatctggaaagcggaaaaatcatccctcttgcgggaactgctgtcaaaatccgcaataccgataccggcgagtgggtggtgcagcacttgaactaccccagccccatcgacatcgacaccttcgtgacggattccacaggcaccctcatgttgccggaacctcttccgtttggaaattacgagttgtatgaacagcaaagcccgtggggatatgtgttcgacggagagccggttccctttgtggtggacggaacgcaggacgtcattacggtcgagaaatacaatatcgcgcagaaaggaaccatcaccgtttccaaagagggcgaggtattcagccacgtggcagaagcaggcgggctgtaccagcctcaatacgaggtgcagggccagccgggcgctgtctatgacgtcaccgcattggaagatatcgtcaccccggatggtaccgtccacctgaaagccggtgaactggcggctaccctcaccacagggagcgacgggaccgccacctcggaacccttgtatttgggccgctatcagattttggagcgcaccgcgccggatggcatggtaattgatccagaacccaaagaggttaccctgtcctatgccgggcaggaagtggagattacctccgcaagcgttggttttgtcaacgagcgccagaaggtggaaatcagcctccagaagctgctggagcaggacgaaatcttctccatcggcatgaatgaggaatggaaaaacatcaccttcggcctgttcgccgcagaggaactgactgccgccgatggaacctccatcccggcagacgggctgatcgaaacgattggcgtcgatgaaaacggcaatgccatctttaaaacagacgtaccatgcggcgcttccctgtatgtaaaggaaatcggcaccgacgagcactacattttgagcgatgaaaaatacccggtggtgtttgaatacgccggtcaggatatagccaaggtgcagattcaggtcaacgatggagaacccattgaaaacaccttaaagcgcggcaaggtttccggctggaaggtggatcaggatggcttcgaattgggcggtgctgtcatcggcctgttccgtttcgacgaaaccgaattcaccgaagaaaccgcgtttttagttactgaaagcaatgagatcgggtactttgaatttgacaaggtaccggttggaaattggctggtgcgggaaatcgcgcctccggcggccttcgtattgacggaagaaaccttcccggttgaaatcaccgaggacgggcagaccattgaaatccgtatcgaaaaccagatcatcaagggcattgccgaaaccaccaaggtggacgccgactacccggaaaacaagctgtccggggctgtctttgagatttacgccgatgtggacaacaacggggaattcgacgcggagatcgatcagctggtgggcgaaatgaccgaaaccgagccggggctctatcagatgaaggatctcgtgtggggaagctatttcctgcatgagaaggaaagcccggaatttttccagcgcgacgaaaattattaccccttctccatcacggaaaacggggccgttgtgcggatcgaaaccgaagctggcgtgggcttcctcaacaaagcgcagaccggctccctgaaggtggtaaagacagccgacgatgacaagatcgagggccgcaccttcaaaatcaccggtaccgacttcatgggcaacccctatgagcaggaattccagacggatgagaacggcgaaatcaacgtcgagctccgtgtgggcgaatacaccgtagctgaagcagctggcgaggacgccgaaaagtacatcctgcccgatgaccagaccgtaggaatcaaggcgggagaaaccacaaccgtcaagatgcacaacaagctggtgccggaagtgcctaccgtaccgcagaccggcgataacccgtggatgcccgccctgctcggcgcgcttgccctgttcgcggccctgtccggcggtgctttgctcttcctgcaccataccggcaagaagcggaaagctgccggtggcagcgatgaggatcagggcgcagaagaatgaaaacctttttcaaaggtttttgcatcggtcttttgtccctgagccttttggggcttctctggtttctggtgctccagccggggctgaccaataaagaagcgcaggatttgaaggaagaatacgcacagcccctccccggagaatcctccggggagttaccggctgggaaagaacaggcagcctcccttgtaaacctctccgccctgcaggccgaatacccggatattcagggctggatttccatccccggcacctgtgtggattaccctgttctgcagagcagcgccgatgaacctgaatactatttgcggcgcacctacaagggcgagcatcgtactgccggaagcattttctttcagtgggactgttccccggaaagccggaaccttgtggtctacgggcacaacatgagcgatgggaccatgttcgctgtgctccagaagatggcggacgaagctttccgaaccgagcattccaaaatcctcctgcagaccagcgacgggctgtgggaataccgcattgcggctgtgctgaaaaccgatatcacaaagctctcctttaaccgcaccgaatttgcggacgatgcggatttcctgtcttttcagaaggagctcttcgcacagtcgctctgcaaaaccgaaaccatacccggcgcggaccgccgcctgctgacgctcgtcacctgttcctatgagtgggaaagcgcccgcacggtagtcatcgccacagaagtgaggtgagaatcgacctatggaaccaaaagccattattttgattgtcttatgcgctgtcattttaggcggccttgttttcctgcacatccgcaaccgaaggaagaaatagcggaagcgtttaaccgggcggggcgctgacaggcgctccgcctgcattttttatcatactggagggattgattgaagaaaaccggattgttagaccttttagccgagcagcaccgcacctttatctccaacctgcgcctgctgccggagctcaagtgggcagccctgggggatttgtaccgcatggaaaacaaagagcagtaccccttaaaggaatgggaagaagccgtatcgtacctgttgggctgcgaggtgcgctttaacaattacgaggaaatcgggaaaagcctcaagcctttttccttggaggtgaaatgagaaaatgaatcaattttataccgccgaatctgtgacggaagggcacccggataagctgtgcgacatcatcgcggacagtgtgctggacgaatgcctcgcccacgacgccctttcccgtgtggcctgcgaggtgctggccaccaaggggcaggttatcgtggctggagaaatcaccagcctgtttgagccggatattccttccattgtgcattcggtttttagaaaggcgggatatgatcccgcccgtttttccgtccaatgcctgctccaccggcaaagcccggatattgccgccggggtggactgttcgttagagcgccggagaaatccctcggaagatcagcccgccctgcagctgggggccggggatcagggcgtcatggtggggtacgcctgttcggaaaccccgcagaggatgcctctgccggtggtgctggcccaccgtctcaccagcgccctcgccgccgcccggaaaaccgggatggtgcggggcctgcgcccggacgggaaagcgcaggtcaccgtggaatacggcgaggatggcaagcccctgcggctggataccgttgtgctgtctgcccagcacagcccgaataagcccatggacgaactctgctgggaactcaccgataaggtgctggccccggcgctgcaggctttacccccggacgaggatacgaaaatccttctgaacccttccgggcggtttgttttgggcggcccggaagccgacaccggcctcaccgggcgaaagctcatggtggacagctacggcgtgttcgccccgcacggcggcggtgcgttttccggcaaagatcccaccaaggtggaccgttccggggcatacatggcccggtacatcgccaaaaaccttgtggcggcgggcttgtgcgaaaagtgccaagtcacgctggcctatgccatcgggaaagccgtgccggtcatggtggaggtggataccttcggcaccggtatggtttgtgccgacgattgtctggcagaggcggcgcgcttcgtgttcggcttaacgcctgcggagatcatcgcccagcttgaccttttaacgccaagatatgcacagacagccgcctatgggcatttcggaaaaccggaatttccgtgggaacgcaccgatcaggcgaaaatcctgcgggcggctgtcatttaaccagaaaggagcagccctatgcccggagtaacggaagaacaaatcatcgccgccagacggatgaccgccattgagtttttgcggcggtaccggcccggagaactggtcaaaaccgacagccggggggagtttgaactccgggaacacgacagcttcaagatcaatgaagaaaccagcttctggcactggaaaagccgggacgcaggcggcaaatccgccctcgactatctcattaaggtagaaggggtaaagtttgtggacgcggtgctggccctctgtgaagaaaacccctgctacatcccgcccccttcccagccggagcaggaaaaggaattcgccctgcccccggcatcggcaaacaaccgcagggtgttcgcttacctcctaaagcgcgggatcagccgcaaggtaatagaagcctgcgtccgggcggggattctctatgaaagcgcggactaccacaacgccgtgttcgtgggaaaggatgaagccggtactgcccgttacgccttcctgcggggcacctataccaaaggaaagcccttcaaggcggaggtgtccggcagcgaaaagcaatactgcttctgcctcccgcccaagggaacaaccaaccggctggctgtgtacgaagcagccatcgaaaccctcgcccatctgacgctggaagggactgcggataaatggcggctgtcccttggcggaatcagcgccccgaaagaaggagaacagccacgctccttttccttcaaaaagccgcttgcattggaatccttcctcaagcggcacccggaaattgaggaaatcgaaatctgcacaaacaacgactttgccgggcggtgggcggctgaacacttggaaaaagcctatcagggcaaataccgcatggtgaagaacctgccggaaaaagagggctgcgattatgcagatctggcaaaagaacgatatgagaaacaggccgcccgccagagggcggcctgctctcgttagaaaggagattggaacatcgacgcaaacaacattatatgtaaactttatttccctcttgccggggactttatggatgacgatagctggaacaacgggacagccgaccttcctgtaccgctgaacggcgctgatttagccgaatacgaaggcccgatccttcgcgctgtggaaagctgcaacagctataacgaggggaacctcatgctctgctttagaaaagaatggaaccccggcgttaaggaaaaggtactgagcgccatcccctcggtggagatccggggcggcgagctcatggcctgcgccacggtttgtctgaaggaacctctcacagaagcagaaatgaaagccttgcaggatcacctgcgggatcagttttcgagcggctggggagaagattttgaacagcaggaaatcaaggttaaaggcggcgtaatcagcgtccacttttgggaaaccgatcgtttctccattgaaatggagcagcctgctcctaaacgccccaagatgaagctggaaaaatgggatggggatatcctctccgtcctcaaaagggctgaacgcctgctgatagaaaatgggcagccggaacgggcgaaacagatgatggagcagttccgtacattttacagcctatcatccggcgtcatcagccaatacgtggaaatcgatctgccggagaaaaaaacgaagaaagcgaaaaaggaccgtggagaagaacgatagaaaggggctatgacggattgaaacacagcgaaccgctgattttgaacaaggaagaattcttcgaggggtttgacaatccctctttacaggaaaaagtcgttggaatcaagatcgcccttcttcagaatgacaacggcgaaataggtcttgggcttgggattgaagcgcctccgttacattcgagggaaatcgaggaaataagccgcttttttgcgaaaaagtacaatgccggcgaaatgatgcagaagctcttacagcactatcaggatcagaggtcacaaaacgcagacaggaaaagccaatcagatcagaagtatgagattaccgatatcgctcacccgcaatacccatggctgcaccgcatccgggcgttacaggacgttcgggaagatgttcatcaaggcgaccttggcggctttgtagaaagcgaacggaatctcagtcaggaaggaagctgctggatctacgataacgcgctcgccggggaaaactcccgtgtcattgaacagagcaccctgcattgggcctgccgggcgcttggctcgtctatcatttccggggacgcccggctggatcggaatgtatgggttttagacaacgccatcgttgccgcaggaaccgttaccaatatggttaccatccaaggggacgcaagaatcctgcccggctccggccatagttctcctgtcattaagaacgacgccgttatctacggaaccgtggtaggaaatgtggagatctccggtttctatgaattgccgccgggagaaaaactggaaaaccacagcagagaacctttgaaaatctatgccgatgaatataccggtccgctcatggggcttcgtgagccgcaaaagccgaaaggctttgtcatgccggaacaacagaaaaaacgctccgacagggagcgataaccaaacaacgaaaggatgatgcctctgaacaaaacgaaagagctcgcacaagtcgtagacgaatccattttgccgttggaacatagcggcggggatggctggaccatcctgcatggggataccctgcagatcatccgggcattcaagccgcaggtgttcgacgccctcatcaccgatccgccctatgcttcgggcggctggaaaccctcggagaaaaaccgcaccaccaaccagaagtacagcagcatgaaccccaagaacgccctgccggatttcgacggggataaccgggaccagagaagctggacgagatggatggcggagtggctgtccgacgcccggaaagcctgcaggccaggagcgcctgtctgcctgttcatcgactggcggcagtacccctccatcaccgacgctttgcaatgggccgggtggatctggagaggatgcgtggtatgggataagatgaccagccgcccgcagaaaggccgattccgccagcaaagcgaatatgtggtgtggggctccaacggccccatgccggtgaaccgccctgtgggatgtttgccgggggtattccgctacgccaatccgcagaaccgcacccatgtgacagagaagcccctgcagcttatgcgggacttggtgaaaatctgcgtaccgggcgggcgcatcttcgatcccttctgcggggctggaaccaccgtcctcgccgccaagctggagggatatgaagccgtgggcgtggaagttaccgacgcctactacaaattaggctccgaccgggtgcgctttgccttggaagcccataccgaagcggaagaaaccgccgaatcatcctgtggttgtccacgtggatgaccaacagaaaaccaaacggcaggctggacgtccacatggacaaccagcctgccaccattttatcaataccgattaaggaaaggaaaatcatcatggaaaaagcattcgcctacatttgcgcggcttccgatgccgcgccccgcctattaaaacgctactgccgcaaggtttatgagctcggatacgtccccatctgcccaaagctgagtgaagcgcagtacctccagccggacaacgccgacgaaaagagggatttccacaacatcgcccgccagaagctgggccggtgccgtatgctggtggtgtgcggcagcgaaatcagccacagtatgtccgctgagattggggctgctgaaaaacgcaatcttatctgcaccacccttgacggtcttgccaagatcaaggaagcggatgagaatggtggcctctgattcgaggtcgttttttctttgccagccggtgactggttttgcaagcatagcgtttggatatccaaacgcatcttggggagaaccccaaacccccgcagaaccgcaccggctgattttgttcaagaaatgagaggtgaaaatactgagagaaaagcaatacgccgcgttcgcggcaaacgccaaaatgctggacaccctgcgccggaacgaggtaaactacgtccccggcgtttttgaagtggcaaaggtcatcattctgagcaaagaggattttgaaaaactctcggaggacgtttccccggaataccccttcctcaaggataaccgggaaatcatgagcgcctcgccgggcgggctgttccgctgcctcatggtgcgggccgaaggggaaaaagaaaatatgctgattgcccaagggaaggataccctgtatcttggctacggcagggattaccgcaacgtcgacctgcagggagtgccggtagaacgcatcgccttggaagaaccgaaagcctatcaggagcacgctgttttttaccacaggcccagccatatcaacgacctcaatgggcagaacccactgcggcctgtgccggagcggcagaccagttttcaggtggaacaggtggtcgttctatgcgatgagcagttccggcagtttcaggaaaccggcctcaaggatgaccagattttcctgttcgattacagcgacaagatgtggtttgatccgggcagcctttgctggcattgcgtactcgttaagggtgaaaccggtaaagagggcattcttgtagatgcggaagggtattcctacgcccggtatgcggcattcgcatcggattgcgacaggctgcgcctgcaggatattcccgtccattacgaacaccctgccagagtgccggagcagaagaaaacccggaaacggaaagagccggagcgttaaaaggagcctcgctatgagaaaacgaaaccacatcattcctctccatctcaacaaaaaggaactggcccatctggaagcgcaggtgaaaacaagcggcctgccccgtgaggaattcctccgcaccctcatcatgggtgcggaactgcgggcaaggccctgcgaccaccatacggatctgctccacaaggtggctgggttgtgcaacaacgcaaaccagcttgccaaggtcgctaatacctatggagaggccagccagcaggatatcgaggaaatgacgaagctggcccggcaggtttgggaagaagtaaaggagaactggtagccaacctgcggttggatgcaattcgcgcacataaccaagacgtgaatcagcctaagctacctgcgcccaagaaaggagaaaaccgctattgcctacaccagcattatccccgtccaccgcctcgacaacgccatcgactataccctcgacgagaagaaatgctcccgcagggaaaacgaggaatcgctggaaggggaaatcgataaggccctcaacaaagacaaaaccgagcaggatctgttcgcatccgctctcggctgcacctgtgaaacggcttttcaagatatgtgccgcgtcaaggaaatgtggcacaaggaagaaggtgtgcagggcttccatctggtgcagagctttgctgccggagaggtaacgccggaactggcccaccagatcgggctggaatttgcggatcggctgctcggcgggaactttcaggcggtggtcagcacccatctcaacaccaaatgcattcacaaccacattgtctggaattccgtgtccatgaaaagcggcaggaaataccgcagcaatgaaagaacctatgtcacacaggtacggcagatttccgatgaactgtgcagaaagcatggcctctccgttattcatacggagaaatcggaacggattgcccgtccctatgtccagtggctggccgagcagaatggagcgcccacatggaaaacgcccatccagcaggatctcaatgcggcggttgcagcttccctcacatggaagcagttcctgcggacgctggagcagcagggctatgcctttcggtttgaccgcaaataccccacgctgatcctgccgggcaatgggcgcaccgtgcgttttaagaccttgggcaagcagtacaccccggaggccctccagcgccgcatcctttaccccaagccaccccgccgggctgggaaagaacagccgccagccagccgcttcctgctccttcttggggaaacgcagccccgcaggctttccggcctgcgggctctctacttttcctacctctacaagatgggggcgctgccgaaaaagccccggtatccaagctatgctgtgcgggaggatatccgcaagctggacaaacggatcgagcaggcagaattcatctttaaaaaccacatagaggaccggggccagcttgccgccattcggcagaaagcggaggatgaaatcgctgtcctcataaagcagcgccagaagctctatcgctatgaaccgggctctccgcagatcggcgtcctcacagagcggttgaaaaagcttcgccataccgccaagctgtgccggaacatcgaaatccattcgatagagatggagaagcggctgcaggcggcacagatggaagaacaacggcggcgggaacaacgggaaaaagaagaacagcaaaaggaagcccgaaatcaagaaaaacaaaggagatgattgtttgaaccaacggcctacaagagaacaagtggaacgcctccggcggcagtaccctgccggaacccgcatcaccctgcattccatggacgatccgcaggccccgccgcccggcaccaagggcaccgttgcctatgtagacgatatgggcacgatcggaattgagtgggacaacggctccgccctgtccctcatccccggcgaggattccttttctaaagaagcctcgccggaaaaaacaaaacacaaacgctcctgtgacttggagcgataaaaggaaggtgaattgactgaactacggaagcgatccagccgaccagatcgttcgatttacccttgagggcacggaaatggctctcaagctgtcgggcatggcggcaaaaaactttgcgctgtttgtctatgccgtactgaaggaccagaagaaaacccacggcaagacaaggcttgtgcggatgctcagggaacagcgcccgttcaaattctttaacgtccccacggaaaacatgaaggagttcgccacggaagccaaaacccacggtcttttgtatgttcccattcggaacaagcaaaaggcggaccgcatcgaagtggtggtgttcgcggatgacgcctctaaggtacaacgcatttttgacaacctcggccttgacgcggtcaaagcgcaggctggcgaagccaccatcgccagcgtacaggagcaggaaaaacaggctcccgcagccccggcccccgacaaaacggaaaccgtcaaaaccgagcagggcgaagtggaatttgaggtgggcggttttgaggacgatttcaatatcggcccaacccagcaggataccgccgaaaattttacttctggccgggagaaggaatcaaatcccccggcagtggaaaagagtccgtccgagccttcctcgcccagcaaaagctcttcgcccaactcaataaaccctaaagagccagaacataagccctcggtaaaaaaggaactacaggagattaagcaggggcaagcgaagaaaaaagaggaaaaggccaaacagcaggagcgccagcatcccacccccagccattccaaacagaagaaaaagaaaaaacagaaaggaaggtaatgccctatcgatttatccagtttaatcggcaaaaagcaggaagcccagcctcagccggaacagcagtacaccaaggaagaatacgccgccatgaagcaggccgaacgggaggatacctgggcaagagtcaacgcacaggccgagtcggtgttcaaggatgacgaatccatgaaaggctttctcaatttcatggcgaactgcacgccccagagcacccggaatctgctcattctgtatgagcagaacactgaaatcacccatccccgcaccttcgataaatggaaggaagccggacgctccatccgttccggcgagaaagggtacaccttctttgccgatcaggaatacaccaaagaggacggtaccatagcgaatggttataccatcacaaaagcctacgacatttctcagaccagaggcccccagcccctgccgccccagcagcatctgccggaggaaatcatcgccaccatggtagaaaacagccctgttccgcttgccatctccgatcagcttccccaaggggtgcaggcgcagtatgtgccgaaacagcgcaccatttttgtccgaaacgggatggatgaaaccgcaaccatctgcgccattgcccgtgagcaggcccacgccagcttcgatatggtgggcagcggttactaccggcaggcgtatgcggcccaagcctactgcgcggcctatgtggcggcgcagaaattcggcttggatacctccgcctttcatttcgacaaggtgtgccaaagctattcggaaaggagcgcggacgataagcgcggctttttgggcgacgtcaaacgggccgcctatgccatcaaccgggacgtccaaaggagcttccgggatttggagcagaccatccagccggatgagttctccgtcgcagcgcccaagcccgccaaggctgccaaatccaaggcggagaaagagccggaacgatgagggctgatcgttttccgtttgttttcttttgtgcggtagctttccgccagccgttgtggtatggtggttgtgaaaaaagagaaaggaagggatcgccatgacaaagcagcgactggtgaaaatgacctgcggggaccggaacatactcgtcaaggcgcttcgcagcgcgcaggaatcggttgagcctgaactgtccggcaaactgcagctatttattgatcgaatcctcagcatgccaaagcgcaggctgtacctgaacgatgaggagtaccagtacgccacgctgtgcttaaacgggatgcggaacgactatctggcggcagaccgaagctgcggcgggatcgaccgtctgctcttaaaacttgtccgcgccagctacagaagtatcgtcagcagataaagaactgctttacccccggagcctttggaaacgcttttccatgggctccgggggatttttttgttttcacggaaaggaaggatattttttgattcgataaccacaagaaaaaatccatggtgggtgtggcttctgccgttgcccatcgtctggtggctggccctattgacagccggaagctggagcgaagggatgaacctcgtggatctgctggggaagctctcagccgccatgaacagccccttttctgttcattggacgggatattccgcccggtgcctgctgttttttactcttgcatatggaattgttgtccttgtgatcgtttccagccggaagaacacccgcaggggcgtggagcatggctccgccaagtggggcgatgtattccagattgtaaagaaataccgggataagaagaaccccaaggaaaacctcatcctgacccagcatttccagatggggatggatggccataagcacaagcgcaacaccaacgtgctggtcatcgggggctccggcgctggcaaaagccgttcctacgccattcccaacgccctcaactgcgggaactgttcgctggtcatctgcgatccaaaatccgaaatcctgcggaaaacaggcggggcattgaaagccaatggatacgaagtgcgggtatttgacctgttaaaccccgacgcctccttctgctacaaccccttggcctatgtgcgggacgataaggacgtgctgcgcctgatcgaaactctcatccaatccaccaccccgcccggagcacagagcgccgatcctttctggcagaaatccgaaaccgcgcttctgcaggcactggttttgtacctcatgcacgaagcgccgccggaagaacagaacttcgctatggtgatggaaatgctggctgctgccgaggtgcgggaggaagatgaggaatacgagtcgcctctggacatcctgttcgcaaggcttgaaatgcggaacccggagagcatcgccgtgaagcaataccatgtctttaagatgggggcgggcaaaacactcaagagtatcctgattagtgtgggcgttcggctgtcggccttcaacctgccgcagattgcaaggctgacctataccgacgatctccatctggaggaaatgggcgagaaaaaggtggccctgttctgctgtattcccgacagcgataaatccctcaattaccttgtaggcatgatttacggacagctcatccaaaccctgtactttgtagcagaccggaaatacaagggcaggctgccggtgccggtccatctgctgatcgacgaggcccccaacatcgccctgcccacagacaactttctgccgtggctttccaccatgcgaagccgcaacatcttttgcagctatatcgcgcagaatatggcgcagatcaaggcgctgttcaaggaacagtgggaatcgctggtggggttgtgcgacgagtttctctatctcggcggcaatgaaaaggaaacccacaaatacgtttccgagctcatgggcaaggaaacattggatacgaacacctatggccgcagccgtgggcgaagcggcagcttcagcgtgaacgaccagcagacgggccgggagcttctcacccccgacgaggtgcggatgctggacaaccgcaaagccattctttttgtccgtggggaacgccccatgatggatgacaaatacgacctcatgcgccaccccaatatccggctgaccgaagatggcggcgctgcgccctacgattacacgcaggcaaaggacgccgcagacgatatcgatttttccccggaccagtacgacgattttgaactgctggagccggaggattttctaaacccataaaaatacactttgaactggaggaatgcttctgaagaaaaccctgaatcgctttgttttgaagaaaaatcccaaaaagaacgataagcccgcaaatgccctgccccttggaagaaaggggcggctcggcttttccgtctacgcagccgccgtgctgtgcttctgctgcttttccatcccggccttcgccgccagcgatccgttgggcgtggtgaacaacctgtccgattttatcttttccctgatccgcgccatcggcctcatccttttgggctggggcgtggtgcaggtcggcctctccttccagagccacgatccctcccagcgttcgcagggtttcctcaccctagcgggcggcctcgtgattacctttgccaaggaaatcctcgaccttatcaccgcctgattttctgtattccagtcaagggaagcgcccggtggcgggcgcttccctttattttttttgcaaggaggtgaccagccggaaactggattgttgataacttaaattcggcgctggaaacatggaacgacaagctggctgaaatctggacgctgcttacccaagatcccgcaaccttcaaaggcggcgggatctggcaggtcatgctggacatcaacggggccctgaaagccattgggtacggcctgctggttttgtttttcgcggtcggcgttgtcaaaacctgttcgagccttgccgatctgaagcgcccggaagcggcatttaaaatgttcatccgttttgtactggcaaaggcggcggtgggatacggcctcgacctcatgctggccgttttcaaaatcattcaggggatggtttccaccatcattacccaatccggcctgtcgggaagcagcggaacgacgcttccgcaggagatcatcgacaaaatcaacaacgtgggcttttgggacagcatccctctgtgggcagtcaccctgctgggcggcctgttcattacggtgctggcgttcatcatgattctgacagtgtatagccgcctattcaaattatatatgtacacggctatcgcgcccatccccatgtccacgttcgccggggaacccaccagcaatgtggggaaaaacttcctgcgttcctatgcgggagtgtgcctcgaaggggccatcattgcgctggcctgtatcatcttctcggttatggcgtccagcccgcctgcggttgatcccaacgtttcggcagttaccgccgtatggagctacgtgggcgagctcatcttcaaccttttggttttggtaggcgctgtacgaatgagcgacaggatcgtcaaagaattattggggctgtaggcccaaaaggagtgaagcgatatagaagtaaaagtaccaaaagaaatccgggactatcaagaatctatttttttcggcctctccacccggcagtttatctgttccctgctggccgtaggcgtggcagtcggcatctatttcggcctgcgcccgttggtcggcagcgaggaagtgggctggatgtgcatcctcggagccgcgccctttgcggcctgcggctttttcaaataccacgggatgacagcagaaaagctggcttgggcgtggttcaagtcggaatttttgtacccgaagaagctggtgtttaaatccgacagcctttactatgacgccatgaaggacgccatcgcggagggggaaaagcctccccgcaaacggaaaacccgcaagccccagccaccggctgggaaagaacagtaaccttttcatttttcgcactgaaaggaaggatgcctatcatcaaaacgcttctcaaagcaacgaaattagaaaaagaaaaattcaaaattccaaagtccgtacaggacgctatccccatccagcgcatctggccggatgggatttttcaggtagggagccggttttccaaaacctttttctttaccgacatcaattacagcatcgccagcaaagaagataagacggcgatgtttatagattattcggaactgctgaacgcgctggactccggcgcttccgccaagatcaccatcaacaaccgccgcattgacaaagcagaattcgagaaatccctgctgctgcccatgaaagaggacgggctggaccattaccggaaagagtacaacgaaatgctgctctccaaggtaaccggcaccaacaacagcgtggtgcaggaccggtacatcaccatcacggtggcaaagaaaaccatcgacgaggcccgcacctattttgcccgtgtgggcaccgacctcatcacccacctttcccagctttcctccataggccgggaactggacgcagccgcccgcctgcagatcttccgggatttcttcaagggtggagagcccgccgcctttgccttcgacctgaaggaacacatgaaaaaggggcacagcttcaaggattggctctgccccgacagcatggaattccagaaggaccacttccgcttaaacgaccgatggggccgcgtgctctacctgcagggctatgccagctacatcaaggattccatgattgccgagctctgcgacatggaccgcagcctcatgctctccattgatattttaacggtgcccaccgacgaagcggtgcgggaaatccagaacaagctcttaggagtggaaacgaatgcggcgaactggcagagaaaacagaacgccgccaacaacttctcggctgtcctgccctacgatatggagcagcagaggaaagaaaccaaggaaatgctggacgatttgacaaacagggatcaaaggatgatgttcggccttgtgaccttggtgcatttagccgataccaaagagcagttggacagcgatacggaaaccctgctcactacggcaagaaagcatctgtgccagatgagcgtcctgcgctggcagcagaaggacgggctggacacggctttgccctacggcctgcggagaattcaggcgttgagaaccctcaccaccgaaagcactgcggtgctgattcccttccgggcgcaggaaatcctccagaacggcggcatctactatgggcagaacgctgtcagtaaaaacatgattgtggcagaccggaggaagctgctcaacggcaacagcttccgcctcggcgtatccggctccggcaaatccttctccgccaaggaagaaatcgtcagcatcgccctgtccaccaacgacgatatcctgattttagatcccgaatccgagttcggctttttggtggaagccctcggcggcgaggtcatccgggtatccgcctcttcggatacccatctaaacgccatggacatggacaaagcctatggagacgagcgcaacccgctgattgaaaaatccgaattcatcctctccctgttcgagcagctggtgggcgcgggcaacgtgagcgccaaggagaaatccatccttgaccgatgcacctacgatgtgtaccgggaatacgttgccaacaactacgagggcgaaccgcccaccctgaaagacctgtaccactctctgttaaaacagccggagccggaagccagagggctggcgctttcgtcggaattgttcatcaccggcagcctcaatacctttgcccagcgcaccaatgtggataccaaggcccggatcatcgcctatgacatccgggagttgggcgaacagcttatgcccatcgggatgctggttaccctcgacgccatcttcaaccgtgtcattcagaactggaagaagggcaagaccacatgggtatttgccgacgagttttacctgctgttccgttatgagtacagcgccgactttttctacaagctgtggaagcgcatccgcaaatacaacgggctggtgacagggttaacacagaacgtggaggagctcctccgttccgacaccgcccgcctcatgctggcaaactcggaatttttaatcctcttgaaccaatccgccaccgaccgggacgaactggcggggcttctgcacatttccgaaaaccagctctcgtacatcaccaatgtggcggctggctgcggcctgattcgctgcgccgggaatattgtgccctttgaaaacagcttcccccgcagcacccgtctgtatcagctcatgaccaccaagccggacgaggccctgagaggggtgtaaccatagagaaagccaattcctgcagggggccgccttcggctctctgcttattttctttgcacaggtcgtatagagaggcggaaaaagcgcctgctgttctgagcaaatatctgtgtgtattttccccattcccaccacgcataaatatcgcaatcttgacgcagatagtcataaacataccgcatgattgtttttgcgaattttctcccgtaagcataacttaaatgatgttgcagcttatatcgatatggaacagatagagatttgtatggtgcttttttggttgcctcccatttggtattaaccatgggcgttatcttctgattgtgtgttcccatttttagctcaactttataaatcataaaatcattcctaaaagggtcgacagcgttcaagctgtatggatgatacactttcaatatgccatattacagcgaaaaaatcaacggcggatagacttccaaaacaccatttatatagaactttggctgatgtttaagattttactactcttatttgctcgaactactattctgatagggggccgccttggacactctgcaatcttttttacaggaggtatgccattgaaagaaattaaaacgaagccggagggcggcaaacctaaactgctggacaaagctgccaaggccccgaaaacagccatgaaggatttatggctgaaatccaaggataaatccatctcggaactcaaggaaacgcccttcgccagccagcgcggggaatcctctaacgcccctgccaatactgccggggatcagatgctgtccgggatggaaaccgccgccaagaaaggcgcgaacctgacctaccggggcgggaaaaagctggcgcaggccacggcccggaaggtgaaagaaaaaagagagatttcccgcaccctgtcgggggccaaagatgcaggcggcaaggctgtcaaaaacacatcttcaaaaatacggacgaagaacacagtggccaagactatcaaaggaaagccgcaaaaggcggtaaagacagccagccggtctgtgaaaggcgtaaagcagagcgccaagaggatcaagaccgcacagcgttcggcaaaaacagcacagcaggcggcgaaagcggcacagaaaacagcgcaggccaccgcaaaggcggctaaggcagccgcccaagctgccaaagctgcggcgaaagcagcggtaaccggcataaaggtggcggtcaaggcaaccgcagccgccatcaaagcaaccatcgccgcaattaagggattgatagccctgattgctgccgggggctgggtagctgtggtcattatcctgttgatttgtttaatcgccctgatcgtcggctcctgcttcggcctgtttttcggctccgactccacggggaccggtaccagtgtaacgcaggcggtgtctaccctcaacggggaatatctggcccacattcaggagatagaggacgccaccccccatgaccggatggaaaccacctctaacgacgggaaactctccatcaattgggaggacgtcctcgctgtattttccgccaaggttactggcgcggaggatggggcgcaggtcgcttcgctggatgacgcgcaggtggatgaactgcgaaatattatgtgggagatgaatgcggtatcctccagcacccgcaccgaaagccatgaggtagaagttaccgaagtagacgaggatgggaacgaaaccacccataccgaaacggtgacggaaaccattctggaaatcaccatcacgcacaaaaccccggatgaaatggcccgccagtacaacttcaattcccggcagaacgaatacctcgcccttatgtcggagccggaaaaccaaagcctgtgggcggaactgctgggcggttacacaagcggcggcgggcagatcgtgaaccccgatgccgattggatagggacgggcattttccagtggccccttccgcagagctacactatcacctcatggtttggataccgggaagatccttttaccggggagatcgcctaccatagcggaaccgacatcgccgcgccggaaggtacgcccatccttgccgcagcagacggaaccgtcaccatagccaacgccatcgactcgtggggcggcgggtatgggtaccacatcaaggtaaaccacaacgataccttcgataccctgtacgcccattgttcctccatctgcgtaacggttgggcaggaagtgaagcagggcgaggtgatcggctacgtcggcaccaccggaaattccaccggtaaccacctgcacttcgaggtctggcaaaatggggaacgcaccgacgccctcggtttctttaaggtaaaggaatagcgcctgcaaatcaaagaaatgtcacacacggaagcagcagagggttgttatatatatggaaaaaccagcagcctgcaaaaaacaggctgctggctttattttgtttcaaggctgtatccgacatcacggatacagcgcagacggatactggaatcttttcctaaattcaacttgcgccgaattgactgcacatgatggctgacaagcttccgagcctcgccatagtctggctccttccagattttttcgtaaatctggtcatgtgtcagcacttggtttatgttctgaaaaaggtacaggagaatctcatactcggttttcgtgagagggatctcccgccctttgcagaatacccggcgctggttttccctgatttccaaagcagaggtactctgttgtgacctaaactccatcagctctatacgagaagcggattgggccagcccctgaactttgagaaacgcatcctcatctccatcctcaaagatcaaaagcatgattttcacttgacctcttcgccctgcctttcaatagaacgccttagtttttcaaaggcttctggactgattccatgctccatccggcaggcgtccgcttccgcagttttaggatctacgcctgccgcgatgagccgttccatgaaaaagcagtggcgttcatatactgctgcggcaacctgttctcctgaagatgtcagggaaagtatgccgcttgaatctttacgcagatattttgccttggttaattcttttacagcgcggcttacagagggttttgttacttccaaatactccgcaacatctacacaacggacatccccttgtttttgaaaaaggatatatacagcttccagatagtcctccatggatgatgttagacgcagtcggcacacctcccttatctattaaaagtaaaagagataatctatgaaaaattactttaatttaattgctgcaacgtcaacatgatttggaatactgttgaatgtgtaggactctatcacctcattattgaacaccgcatattcgtttctgtagttcaacggaatcacaacgctgctttcatttgcggaattaagggcagtggtaaagatattctgaacagtatccggatcatctgtcttgtaaaggccggcaatcagttctttcgcttcctcttcgctcattgtggcaagtgctttggcgatctgaggatcagtcgaataaattccactggcatctgtataatcagtagaaggatacatattggcgacaaatgtgtacggatcataggggaaccaatagctcatatacgcggtgatttcgtagttcccttctgtaaacacctgttgcataaatgccatcaggtcaataggattcgtcgtgatttcaatgccaagctttttcatcgaatcctggaagaaaagcactaccttgtcatacacacccgtggagggataagtaatcgtaaaggaaagctttttaccatccttttctcggatgccatcgccatccgtatcagtccagccggacttgtccatcagttcaatggccgcatccatatcatagctcggagttgtcacatctacctcgcaatagggcatatccgcaggcataactgaatctgcttccgttctcaagcccgaataaatattttgagcgatagactctttatcaatagccatctggatcgcttttctgatattgatatcatccaatggagccacttcgtcgttaagcgcaataaactctgtgacaaaatcaaaatcggaaattacgcccgtaatgccttccgtgctggacagttcctgataggaagcagcatccaatgtgtcagaaccgataatgaagtccacttctccagccctcattgcagcgaccttggattccggaataacttttactgtgaaggaatctacatccggttcttcgccccaataattgggattgcgtacaaaagtgtattccgttgcagtatcattcacgctctcaaacatatagggacctgtacccggcgtatgattcatcagatattctgagttcaaagaaccgtcctcattgaaggcggatgctgaaagaatccctctcggcattaccatggacaaatcgttgagaacattgtaataaggacgagtcaaatgaaaggaaaccgtgtattcatcatctactgtgatctcggatgtcaacatatcaagctgcccgtaattggaactggttcctatgacagacttcatattgtcgaaatagagtttcacagcctccgcattgaagggtgttccatcattgaactttacatcttcacgcagatggaaagtataggtgagtccatcatcggaatttgtccagtctgtagcaaggcagggctggtactctccgtcctgatatttgaccaaaggctcataaaagttgttcatataatatgtagcctcataggactgtaccgcaggggcaaagcccatcgaaaagtttgcgctttgcgcaatagagatcgtttgagatgcgttcttgtctgtttggccattactggaggatgagggatctgtattgctgcaaccagcaagaagcgtcaaccccattacacaagccaaaagaagggataaaagttttttcatgtttgtgctcctttacatgttttttattgcaaagcctgcctttttgaaagggcggcctttacaagctcattagaatatggttcatgaaaatccgaaaagctttgcggtttgtaaactgtctcgattattttcccgaaacgcatcacatgaatggtatctgccatatacatcgcaatgtctaaatcgtgggtaataatcaaataactcaatctcaactcgtcccgcaaattccgtaacagatgcaaaatttgctttcttaatgtaacatcaagcccactaaaagattcatcgaaaataatgtgctgtggttctgttgccaaagcacgcgctacacagagcctcttttgctgaccaccagaaagttcatcagggcgacgattcaatatatctccccctaaattaaccatgtccagcaattcttcgactctcttttttctgtcctcttttcccatatccaataaaagatggagaggttcatccaaaatttgtaatacgttttggtgaggatcaagagaactggctgcatcctgcatgacaagctgcactttgcctcgcatcttttgaagcgtttttcttttgacgcctgtcactgttaaattatctaaagtaacttttccggcatcggggagctcgatataggacaaaattctggcaagtgtgctttttccacttccgctttcgcctacgatggccgtgatactgttgtcggcaagctcgatagatacgcctgacagggcttccaacaggtctttttttctacccggtatttgatatttctttataattccttctgcctttagcatagcgcctcctgaaacagtatacttgcttccatcaattgttttgtgtaatcatgccgtggtgtggagagcacctcatgggttctaccctgttcaatgatttctcccgatttcatcaccgcaacacggtcgcacagtctcgctactacaccaaaatcatgtgtgataaccagcatcgatacccctgatgtttttattttttccagttcatttaaaatcaaatattcactggccgcatctacggcagtggtaatttcgtctgcaataatcagtttcgaagcctgctgcatagtgagagcaatcatcactctctgcagcatgccgcccgaaagctcatccggataactgttaaaaattttttccgcatccggcaagttcacactggccaacgtattcgtaagttctctacaaaagttgtgccgttcttctctggtattgaatcgaaaccccatttcaagttgttttcccagcttcaccatgggagcaaatgcagtcatgggattctgcggtatcatactgatctgttttcctcgatagtcagccagttcttttgcattcatggaaaagacatctctgccattccagcgaatttcccctctgatttgaaaagcacgagaatttaacagccgcataatacacttgctggtcatgcttttcccgcttccgctttctccgatcagcccgaaggtttctccctcgcctacggaaaagctgatggagtgaagcaattcctcttttgtcagttttgagcgaactgttaaacagttgatatcaagcatttctaaccctcccgtggtgcgtaaatatcccgcaaagcctcaccgaacaaattaaatccaccggctgtaaacaggatacaaagccccggatagaccagaagctgcggctgactgaaaatcagttgtttggcattcacgaacatggcgccccactctgctgttcccgcctccaagcccagccccagaaaggcgtaactggaaatcataatgataatggaggacagtcctgtactgaatatcaccaaaagatgtggaaggacatttggaataatatgccggaatataatccgcagttctgaacagcctgacatccggcaggtgataacataaggtttttgtttttctctgagaacgtaggtacgaaccactcgtgcattccatacccacatggcaattacaatggatagaatggtactgaacacttttgattcaaataatcccaccagagtaatggccacaagaaagggtggaaatgccataaagatgttagaaacaacatcaaaaatccggtcaagtacaccgcccagataagcgcagacagtagctacgaccgtactgacaagtgccaaaatgataagcgagggcagagcgatagacatagatgaccgcgcgccatagagcaatcgtgaaaatacgcagcgccccatttcatctgttccaagaggatattctgaatcaggtgcagacaaagcatgcgcgacgtttagctctgatggatcatgcggtgctataaagggcgcaaatgccacaacaaaaaatacaattaacatcatggccaacccaagcagtgcctgcggtttatgtaaaattttacgaatcataaaccttctcctttgcttttccgtgtgggtttaaagcgatattgaccagatccgctataaaattaaccagaacaaaaatggcggctgttaacaaaacacatgcgttgattgtaatagtgtcccgtgcatttaacgctgttaccaacatagaacctattcccggaatagaaaaaactgattccaccattgcgctgcctgctatcataaacccaaaactttgggcgagcattgttaccaaagggggcagtgcaaaccggcttaccataaaagcgattctgcgttccgaaaccccacgtgaacgggcatataaaacgaaatcctgactatatccctccaaaagtgaagaacgaaacacacgaatattacctgccgcaaccgggattgccagagccaaagccggaagaataaaatctttcatgctgtctgcccccataatgctgaagatcggaatctgaacagaaaaggccagcaggagcataaaaccaatccagtaattgggcagagacatggaaacgatcccaaacaagtaaactgttttatcgaataatccaccttttttactggcagatagcacacccagaggaatactaaatatggctgcaaacaacaacgccaatgatgccattgtgatggttggccctaatgaggctgtcagttcttcgatgatagggcggcctgtattgtaggaatttccaaaatctccatgtaacgcgttccacagccaagaaccatattgctggatcagaggtttgtcaaggcccaattcttcccgtactaattcaacctgttctggagtgggtcttgaataccggcgcacagccaaagcctcagccgcatctacaggggataaatttgtgtagatgaaagtcaaaatcgtgatgccaaacagcacaaggagaaataaagataagcgcgtcaatatttttttgctcatactccaactcccaaggctccttctccagcaatactccagctttcggctttcttcctgctttggacaaaatccgcatagattccatcctgctttatcaaatcctcatgtctgccgcgctgtatgatacggccagcctccagaacaagaatctgatccgcatgttgaacggttttgagcctgtgggcaatcataataatcgttttattatgcgtcaacgcttcaatcgcttcttgaagttcagcttcattttccgggtcaacgttggcggtagcctcatccaaaatgatgatcggggaatctttcaacatggcgcgtgcgatggataggcgttgacgctctccaccggaaatagtagctccaccttctccgatcaccgtgtcgtaaccatccggaagggcagaaataaagtcatggcaccgggctgccttggcaaccgccacaacctcttcgtgagtggcaccgggttttccaaatttaatattgttttcaatcgtatcattaaagaggtagaccgtttgaaataccatactaaagtttgccatcaagctgtccaactggtattccctgatatctgtcccgcccaatttaactgttccactgtccacatcccagaaacgagccattaaactggtaagagttgtttttcctgatccggaggggccaacgattgcagtggtagtcccttccggtatggaaaagctgacatcatggataatttcccgttctccataagaaaaactgacatgttcaaatgtaatatccctatttttcgtttcttgttttgtaccttgttcatccatgcggggagcatgatcaatctgttccactctgtcaatggaagcgtcaatcatcggaagcataaagaacatttctccggctgactcaagctcgctgtaaacaagaaaagcggaaatcgccatcatcaagcaggtaaataaagtcatagctccacttaaatatagccagatagaaagaagcacagccgctaccgcagcaattcgcaacacaatttgctccagaacattgtatgggatacgcttgcgctccagcttaaagttttgatactccgtttcctctatggttttatttaatgtttgattcgccgccttatcgccatgaaacgcacgaacaacgctcattccctgaatatattcaagaacggaatctaccaatttggtttgtgcctgcaaacgtccgggagaaagctgacgggattttttcagcaattgtgaattaacaaataaaaacaacagtactcctaataagaaaatcaaccctatacgccaatcaaaaaacagaatcgcaatagaaaatacaacagtacggatgatccccaccatcgttcgggcaatgacggcaaacgacatactctccaaatcttccattgtagaagttgctgcagccgtaaggcttcccaagctttgactattgaaatagcccatcggcatgtacttcatacgttcaccgatcctgattcttttttcctcacacatatggtaattggcctgtccttcactgttgtgggccagataccagaaaaccgcagcgcctgttacactgaccagcatgacgcccagtgcggccaatgctgtttcgcctgtaacattttgttctaccaaggctcgcagcacaaccagcaaagcaataaactggatagcttcaaaaatactgcgaagcagttcataacccattcccttataccacgtctttttctgttttccagcaaaagcaaaaaaacgtttatatgcgttaaacattctcagcgcctcctttcataccggcagagtcttttgcctgtatatgcgctttccacatatctgtataaagcggacaatttttcagaagttcttcatgagttccagttgcggcgatttttccgttttctactactgcaatctgctcagactggataatagtcgataacctatgtgcaataacaatcaaggtctttcctttagtaagccggttcaccgcatcctgtataaccgcttcattttccgggtcagtataggaagtcgcttcgtcgaggataacgacgggtgcgtttttcatcatagctctggcaatggcaatcctctggcgttctccaccggacaaatggcttccggctcctcccacaagggtttcgtaaccgtgttcgaggcccataataaactcatgacagcctgcagctttggcgatttcctccacttcttggtctgatgcgttgggattacccatacgaatgttttctcgtacagacacattaaatagaaaattgtcttgggatacatatccaattaaatccattacttgatctgcgggaatttttttaatgtcaaccccaccaatcgtaattgttccttcatcaatatcccaataagaagcaatcaattttgcgatggtagatttaccggaaccagaaggaccaaccaaagcggttgtagttccctgtttaatttttaagtttataccctttaagacttgagtatccttatatgcgaatttcacatcggttaaagtaatatccaatccgtttaagtttttatgttggagtggacgatctaaatccggttctgataaaatagaactgatttctccaacgatggtactgattttggaaaagtcatcggttaaaaagattgcagataccaacgggcctacaatacccagcgataaaatcataatagtgatgaaggcagctgtggtaaggcttccgttcatatagaaaatacatccaatggggagtaccccaatcaaaacagctggccagatggtcatcataagggctgaatacccttgtgtagatttcatccagtcaagaatcaattctgcatttttatgaacagcctgcgtaaatttcccataggacaccgcgctctggttaaacgctttaatgacttcaatcccgttgatgtattctactgtggtagcactcatgtgtttacctgcttgtacgactgccccgtattttttaggatattctttcatttgtgccatatagcacaggataccaatcggaatagtaatcagagaaacgagagccatgcgccagtctaaaacaaacaagtagataatgactgcgacaggaaccaaaaggttagaagtcatttcgggaatgatatgcgccaatggaacctccatctgttctactcgctctaccatagaacttttcagttttcccgatggcgtatcggttagataccccatagaaacctttgtcaacttcgaggcaatccttcgccgtatttcagataaaactgcaaacgttgcttcgtgcgaagcttttgtcgaaaacccatgaaatacagacttcatgatgaaagcgaccaaagcaacagaacaccacaataggtatatagaaaaatcctgttctcctacaataagcaaattaatcatctttgcgactgcaaagtatggtacaataccactggccacccccaacacagataaaaccacggagcaaaggaatccacccttatgcggacggatgaaatccatgatcccaatagatgaagtttgcttcataaaaaatcctcctttcgttagctgtagctaaccattgcatctaaaaaagccgataacctgtaagattcctgtcttacaaattatcggctctgcgtcttagcgtctggctctaacgatactattttattttcttgaacatctatgatatgttcatgtccacacttagggcaaaacaacggaaaacgctttaatactgtatctctgtttaccttcgttctcgttttattgccgcagacaggacaatgaacccagccggatgaatcaatccacccactcaaaagcatcaccccgcattttcttcaaaaatcgtcttccatccggcattataaaaccttctcattctttggatatgctcgacagcctgatcttggggcatatcatgaataaccacttcaaatagtccggcataaaaagcactggacagaaggtgcgccagttccggcgtaagccgtccggaggaaagcgcgtcatttcctgtctgttcaataaactgcatggtacaggaaatatccaattcaataatccgatggataaattcctgatatgtgctattctctccactggtaagaatcagcttaaactcgtcgaaatgatcgtagatatatgcaattaccttagaaaagccgtcgtttccaaaggtcataaccttttctttctgctcatctgatgaaagtattttaaagcgatggagttccccttcgagtaaattacaaaattcatcagccgttggccctactaaagcgcaatacagacttttcttatcaggatatcggatatagatagcgcctttgctggagcctgctttttccgcaatcacctgcagcgaagcgttctcatatccactctttaagaactcttttttagctgattcaagcaatttttcagtaacgccctccacacgttttgccattccatcaactccaaactcgaatttataggttgattttgtaaacagattaaaaccttcggtttcaatccaacagttttaatatactgctttttttgaaaactgtcaagttaattgtctcacaaagttagtttcttctaacctcgaaaaataatgcaatttgcacatatagaaagagccgaataaaattagtttactcggctctttacagcataacagattctattttttctattttgcaaactcctgcataatcaagttgagaatttcctgctgacccgtagataatcccccggccttcggcttagtgctttgtttcaattcttttaccagccgacgaaccaaatcgcgctgctcatccgtcatatccgttaaaagcacctgatcctttttatcaaacccaaccaagtagtctaacgaaacatcgtaaatccttgccatagtggtgaggacatccagcgtggggattttgatattgttttcatagttgctgattaccgatccggcccggcctacccgacgcccaagttcctcctgagaaataccatgcttttcccgcagcatccgcaaatgatttccaaaatcaaacatccctatcacctcgctctgtcctgtgatttcgtgtatagctatattttactccgttgaccttcgcgtctggctaagtgtataataaaagtatttagcgaatcgctaagattatgagcgaatatttttccgatttgcgatgaaaagggagccgagaagcccataagaaaggttttttggcataaaaccgcccgaaagaaatagggcgggctgttcgtaaagagggagtggagtaactgtggtgagaggactcacacccctttattttccctgtaatggcaacacagaaaaaggcgctttcccaaccttttatgatgaaatcaccctgccgaatgttgtaaaatatacttgttatcaagctgacgatttcaaaaggtcagatcgggctacattccccattattgtggcagcgtatgcccaaaaccctttatacaagagaaatccatatccagaattcatgcactgaaaggagtatccaaatgccaaaagtaatgatcattgaatgcagtgatgaagaagccgaccgtttggttgagcagatcaagagcattattgccgaaccccaataccagccatttcgagggccgggaaaggtttatgaattcggctcattgcggattgaccagcccaagcgggaagtaaccctccatggtaatgctgtaaaactaagccatcgggaattcgaaattctcggcttatttgcttcccatccgaatcaggccctttctgcgtcttttctccacaatgccgtctggcttcatccagattcggagcatggagaggaagaagctgccgcctatgtgcgaagcctgcaggaaaaactcggcctgaataaatcgaaccccacctgccggatcgttgaaggtacctgtgcagagaaaaaaggctgttgttttacctttttggttgattaaataaatattcttgttcttttgtcatgtaatgtagataaaagcactacgaaatatgcaaatgaaaggagaatcgaatcagaaaagtagtttttctcttttatactgtccccatctaaatttatatggggaaatatggaaataaaacaacgtccgctttccccatgcagaggggatggcgacaatgcggcgaaaaccaccgcacacagaaagggctgcagcttcatacgaagctgcagccctttttcgttcgacattatctcattttaatttaccattaaatgccaatttcgaggaaacagcctcgctatgcgcattcgcctgcgggcgggtgcgcttttttcatgtttttagaaagaggtcatggctaagaactcatagcggcaggccgccgccccgacaatctgaatttttcaaaatttcagattgatcggaggaaacagccatggcttacaacaaagccagagccgaaaaacagtggctcaaatggaaagaagcagaagaaagaaaactcagagaactcggcgtggatgaggacaccatccaacgcctgcatacatacgattgggcgcagttcaataaggaacggcagtacctgcagcgacaggtagaatggtcacattatgtggactgggtttcagcacaggatctggaactgcccgtcgaggataccgaagccctgctggacagcatcgaggatatggagcttttttctttgctacacaatatggacaagctcaccctcgaaatcctcttcatgaagatggacggatacggcagcaaggaaatctcagagaaaaccggcctgtcagtaaacgccattgatctgcggattttcaaactcaagaaaaaattaaaaaattttttataagcggaaagattccggcctttttcctgggctatagggcgaacggggaaaaagaaacgttcgccttgcagcttgaaaagtaaataccagccatgcgggtacgttcccgcctgagcgagcgactaaaagtttgttatgcacaaacttcggaaaaagcgccatgacgagccgcacgcaagctgcctcccttttcagggatggcggcttgtgttgttggctttgagcgatgcattttgaccggaaagagggggtagtttcccttttcgccacgaccttgggcggggtattatgatacgcgctatcgttttgcccacacgtcagatgggctggccgaccttgggttgtaatcagcaagaccttcggggagccagtgaacggcttgtcaactgcaagcctgcccgcatggttcccaaggttgccggggggcgagcagcaaatacggcacatcaaattcaacccttttatttttattcagattgccgttgacggcgaatccgtgcggcgcaggttttctgcgccgcatcagtttgccgccaacgcacaagagcaaattgctctaaggagaatgtgccgaaatgaacaatagcctgaaagagcaggcccatggggaaatcgaacggatcttccgaatccttctccctcaaaacggactggcagttcgggaagaacagatcaccctatgccacgccatgctggacaccctgctcaaaaacaatatcgctttatgcgacgcgggagtcgggattggcaagacctacgcctacctgaccgcctgcattttactgaagaagtttgccccgcacgggcctgccggttcccagccagtagtggtctccacctccagcgttgccctgcaggacgccatcatcggggagtacatcccatttttgtcccggatttttctggagaaccgcattattcaaaaacccatccgggcgatggtgcgaaaaggcaaggaacgctttgtctgcgatgtccgtctttctcatcggttggaagccgtgaaacataagaaaaagaatgcggagcagatgaaagccctgctctcccttcgcacctattatgatttagacgccgtaaccggcctcagtggatttgacaggcggcaggtatgcgtccccaaggtttgtgagaaaagctgttcgctgcgaaatgcctgccggtaccatcaatacctgaaggaagcccgaagcgcggagattttcgtccagatctgcaaccacaactatctgctggccgacgctgcccaccgtttgcaggaaatgcggccccttctcaatgattaccgggctttggtgatcgacgaggcccacaagctgccggacgcagcacgccagatgtacgggcagagtttgtctgcggaggatttccgtgaactctgcgacctgctggcaaaagaaaaatatatccttgcttcccagcgtctgcgggaaaagttccgcgctctcatgggggccatgtgccggggcgaactgctggaagaagcccagcgcaccgcctttatttcaacgccggatcgggaagcggcccttcgagattgtctttccctccttcggcagcttcaaaaacagcttgccccgcacctcccacggtggcttctttaccggctgggaacaacagagcaggccctcggcctgttttttaccggggaccgaaaatacatcctctacatccagtacgacagggacggaagccccagcctctgcgccgccagccgggaactgccggagcagctgcgccgggcgctgtggctgaaggacgtccccgccatcctgacctccggcaccctcatggctggcggcagctttgaacgcacaaaaaaggtcatggggctgtccttaaatcagcggctggaggattttattgcggtttcgcccttcaattatgaggaaaactgccttctttacatcccaaatgatcttcccaaaacacagatgggcagtgaacaggaagctaagtgtctggcagagcagatctgccgtttagtggaagccacgcatggccacactctggtgctttttacttcctattccctcatgggcgctgtttacaatcaggtaaaagaccggctgtcttttcccttgatggaagtatggcggcactcgcaggacgtcatccaccagttcaaacaggccagcaacgctgtgctgttcgcggcgggctcttgttgggaaggtgtggactttcccggcgatatggtgtcgtcgctcatacttgtgcggctgccgttccctgttcccgatccattgagcgaagcggaacgggagcagtacccaacgctgcaggattatatcaaaaccgtagtaatccccgatatgcaggtaaagctgcggcagggcttcgggcgggccatccgcaccgaaaccgacacctgcgtggtgagcattttggactatcgggcagcccccggagaacggtatcacaaggctgtgctggaaaccctgccgaaccttcggctcaccagaaaaatcgaagatgtcgaggaattcatccgggcaaagaaaggcccggattattttatgccataaaggagattgacatagatgaacagaaaaacagaaacggcggaatttccctacgcagaccgccccatgtggttatacagccgcagcagcgataaaaggatgttcgtcctgattcagcagatgcggaatctcttagaggaagccaatcatcgggaatataccgttgtaggtacttctcaggatatgggtaccggcagaagcatggcccgcatgggcctgaagcagatgatgcggagtgtgcagggcggcttcgtccgcgctgtgcttgtgcgggatttatcccgcctgagccacgatcccgccatcctgattcaaatactggaatttttgcaggatcacgacgcggtactgatcaccaccgagagcgacctgcggtatgagctttacgtcaaggggctggaaaaccgctttttccagagggcggcccaaaagggcctccatttgccatggtaaagggggctgaatttatgcgtgttacttacaatccagaagcgccatcccctctcatagtcaatgaaatcaaatattatatggcgctttcggccttgaaaaagatgctggccgatggcatcataacctctgaaaattacaagaaagcgactgttgctattgccgaaagataccgggttttgcgatacgatatttagtggttatcgtgatagctttgtaccagccgttgtggtaatgttgttgctgcggggtggtcacaatagatgccgcccaagaaagcgcagaaagggcggtgcggagaatgccacaggtgcagatcatagaacctacgataagaccacagaaacagaaaatccgggtttgtgcctatgcccgtgtgagcagcaactccgatgatcaattgaactccttttccgcgcaggtcgaatatttcacccaactaatacaagcccacagcgattgggaattcattgacatctatgccgacgagggcataaccggtaccagagccgacaagcgcgatgatttccaacggatgatgcgggactgcagagctgggaggattgaccgcatactggttaaatccatttcccgattcggaagaaacagcgccgactgcattgaagccgttcgggaactgaaaatgttgggaatagctgttgcgtttgaaaaagaaggcattgatacaggccgcatgaccaatgaaatgtacttttccatgtacagtgcattctcacaagaagaatccacttccattgcgaagaatatgcgtaaaggcgcagtcatgcggatgaaaaatggaacctaccgtctatcccaagcgccttatggctaccgcttagatgaaaaaggcggttttctgatttgcccggaagaagcgaaggttgtccgaaagatatttggggactttctctcagggaaaagcattcgagaaatcgccaatgaacttgcacaggcccaagtgccaaagctgaaagggaaccccgtgtggagtgccaccggggtttcttatattttaaccaacgaacgctatatgggagatgaattgttccagaaacgcttcaccactgacgcatttccttttaagaaagtaaagaaccgtggcgagaaaagccaattttatgcggagaatacccatgaagctatcgtcagccccaatgtatttcgtctggcgcaggaacttctaaaaaagaaaaatcaactccatggacggaaaaaggaaatccagacctatactttctccaaaatgctggagtgcggcgagtgtggaagcacattctgcaggcgggtaaccaaagccggaactgtagtatgggcctgttatcggcatttccgtgacaaaaaattgtgcgccatagaaaatgtgcaggagtccgaagtggaatccgcattcgttaccttatataacaagctggggagaaatcgctcagagattttaaccccattcattacgcaggtggaaaaactgcgtgataaaaatttcatgtcccatccgggggccatgcagttgaacaaagaaatagcggatctgttggagcagaatcatgcgctggctactttgagagcaaaagagtgcattgattctgctttttatatgagtgaaaccaataccaataacaccaagctggaaaatttgcggaaggagctccagcgataccgtgacttaaacgactaccatgaaatactcaatggaagctacctgcttctaaaaatttttgaagagcaggaaagtatctcagagtttgagcctgtagctttccgcaatatggttattaaagtgaggattttttcagacaccatctgtttccggttaatcaacgggatggaattggctgaaagaagataggagttgtaccaatgaaaaagaaaagatacctgcccttcggatatcaaatggaaaagggagaaatcatcccgcaccctgacgagggacctttggtacaggctatcttttcaaaataccttgaaaggaccgccctttcaacactcgccaaatatgcctccttgtcgggcattccttatcgggaaggagccgggcagtggaataaagccatggtttgccggattttggacaattccaagtatgcaggcgatgaaggattcccgccgctgatttcaaaggaacagttggaagaagcagctttcctcagagcagccaaggcaaagcaatatggcggcagcctgcctgtggaaatgaaaaaaatccgccagcagatctgctgcggaaactgtgggcaaatcctcaagcgagtcaatatgcggacaggatacatcttgtgggaatgcccaaaatgcgggataagcacagactacataccagacgaactattgctgcaaagcgtgactgccctattaaaccgggcaattaaaaaccgggaaaagctgaaaccggaagaaaggcattgtgaatgcttatccatcgaagtcctccggttgaacaatgaaattgaccggcagatgaccaatccccgcgctaatgcggatcaactgctccagcttatcatggattgtgccaaagcgaaatacgaagtcagcgaaagcggtgcttcggagcagatgactcagcttatacaggaacggctggccgatcaacccctgatttccgatttcgactacgacctgtttagcagcataacagagaaaatccttattcagccaaatgcttccgttcaccttcaactgcgaaacggaaaaatgatatagcctaccggaaaggagcgtttatatggagccacaagcccccatcaggcagaaaatcatccgggagattaaaccctccccagtgctgcaggcccgaacccgcaatcacaagctaagggtagcggcttactgccgagtcagtacagagcaggaagaacagcagaccagtatcgaaaaccaaatcacctattacgatgatttgattcgttcaaatcctgagtgggaatatgctggcgttttttcagacgatggcatcagcggaaccagagatgagaaccgccccggttttatggaaatgataaagcagtgcaaaaaagggaaaatcgacatgatactggcaaagtcgctatccagattttcccgaaataccctgcaatgcatttcgtacatacgaatgctcaaggatcggggcattatcatccggtttgaaaaagaaggactggacacctcccgtgtaacaagcgaaatattcttcacatggaccagtgctttcgcccaaggcgaaagcgaatctctgagcaacaatgttaaatggggcaaacgaaaagggtacagtcaaggaaatttcgcctttccctataagaatatgctgggctataaaaaaggagaggacggagagccggagattgtgccggaagaagcagaacatatcaaaatgatttttaacctgttcttgctgggccgcagcctgcgtcagatcaaggaagccttggaacggcgaaacatactgacgccgcgggggaatccagaatggggattgtccagtattgaacatatcctgcgaaatgaaaaatatatgggcgatgtactgctgcaaaagagttacaccgtagacttcctgactaagaaaaagaagaaaaacaacggggagctcacccaatattacatcactgacaaccatccggcgattatctctcgtgaggatttcctaaatgtccagcttgaactgaccagaaggaacagcaaaaagaaggtttcccaaaagaaaaccaagagtgcgctgggcaaatactgcagcaagtatgcactttccgaaaggctggtttgcggggaatgcggttccatgtatcgccggaccacatgggtaaaaaagggcaagaagaaagtagtctggcgctgcatcagtcgattggaattcggaacaaaatactgccagcattcaccaaccatatcggaagaagccttgcatcaggcaatcctccaatgtattcaaaaagtggtcgaggacaaagaagatatcctgaaaaatctgcgtgatgttcaagaaaacattatcctgttttccgggaatcaaatcacaccgcaatcactggaaaagcaaatagacaagttgcagcaggaaatgtcggccttagttaaaattatcgcgcagggtggcgatagcgaattctatgccgccaagttacggcagctttctgaacagaaaatgggccttaccagccaactgcaggaaatccagaaaaagaagatggcagatcaggcacaggaataccagtaccaacaagccttgctttatatcaacaatgaggaaaacttgaaccttactgaatttaacgatgactttatccgaagaattattgaacagataacagttctctctgccacccaaatcagaatacggtttgtcggcggatatgagcaggacgcaaacctgccattgaaaaaataggttgcctgcaaaaaaatagcaccgatgtcctcaatacgggggcatcggtgctatttttttgtgggtaactgtttggcccataaccctcttaacataccataacatctcctgaaatttttttgtcgaaaagactggacaggacttgggatgtatgctataataattatacagaaattttgttgcagagtttaccacgattccggttaagccaagcgcaaaattttgggcaaaaaaatttattttttaagttttttgccgtttctcagttgaatacaaggggggatctaaagtgtccaccccttccagaaaaaaggactttgcattttgcaaagtcctttttcaatgaaacgaatcccttcggtatgtgaaattgccctgcgggcagtgaaatgcgctgcgtctccaaatcacccatggttctgcgccatcacgccgaccaacgcgtgcggcacatagggctcttcaaggtatgcaatctcatcagcggtgagcctcaattcaacggcgttcacaagccccgtgatgtgcgaaagattcgttgcgccgcagatgggcgacgcaaccttcgtcagcagccacgcgagcgcgatctccgtcatggtacagccgcgcttctcggccagctccgccacacggtcaatgatcacaccgtcggtctcggcggtcttgtcgtacttaaatttcgcgtaattgtcttcctcaaggcgcttggagctctcaccaggatgcctcgagagccgccctgcggcgagtgcactgtatggcgtcatcgcaatgttctccgccttgcagaatggcgccatttcgcgctcctcctcgcggaaaatgagattataatgcccttgaacggacacaaactccgccatgccgtgcatacgggcgtagtaattcgcctgcgccagctgccacgcatagcagttcgagatgccgatggcgcggaccttgccggccttcaccgcgtcgttcagcccctccataatctcctcaatgggcgtgcgataatcccacatgtggcagatgtacagatcaacgtagtccataccgagacgcttcaggcttgcatcgaggcagtttttcacgtgctgctgccccgtcacgtcgtttgcaatctcctcgtcggtgcgcggctcaaatttcgtcgccagcaccacgtcctcgcggcgggcaaaatcgcgcagcacacggccgacaaacatctcgctcgtgccgccttggtagctcatcgccgtgtcaaaaaagttgatgccgttctcgagcgccgctttgatgatctcgttggagctttcctcatccagcgtccagcggtgctgccccgcggccgcttcgccaaagcccatgcagccaaggcaaatgcgcgaaacattcaggtcagagttgccgagttttacgtattccatgtgtcttccccttttctataaaaattcgtgatttcttgctttcagtatactaaaccatcaaaagaatgtccaatacttattttttatccttctccatgccggaaatgtatttcttcgcaaaatcgaggaacgcgttcgtcagcggtgagagcacacggttctttttccaaacgagcaccgtcgcggcgcggatcggcggctgcagcggcacgaatttcaggccgttatgctgcaggtcgagcttcagcgtgaacagcacgccgttttcgcggcgaatgaccgaggccatgttgtattgcaaatcgccgtgcgcgataatgttgagccggtccgcgctgtcgccgaaccagttcacaatctcactgcggatctggtcccggcgcgaaaacaccgccgggtacggcacaatgtcctgtggcgtcaaatacggcttctgcgccagcggcgaatccgaccgcaccagcgcgttccacgtttccggcaccgggaagtgcagaaaatcatacttgctgatttccaccggctccaacagcaagccgatgtccaacgtgccacgttcaatgcgctccttaatgttatcggagttgccgctataaatgctgtacgtcacgttcgggtgctcggcgcgaaacgccgccagaatgccggaaagatggcaggagccgtggtactcgccgctgccgatggaaatttcaccggtcagcattgcctcctgctttaattcccgcttcgtcatttcggaaagcgtcacgatttcctctgcgcggcggcggaataacataccctcctccgtcaacgtgacgctgtggttgttgcggctgaacagcttcacgccaagctcctgctccagccccatcagctggcgggaaagtgtgggctgtgtgatatgtaaaagctgcgccgccttcgtgatgttctcctcacgcacaacagccagaaaatactgcaagactcgtatatccatagatctgaaagcagcctcctaaacctcgggcggcaaacgcgcaccctttatatttcgtattatagcacgcctgtcatgcccatttcaatacagcgcattgttcaagttgtgcagacaaatcttgtgcaacttcaataaagttttgcgccttatgtaaatcttctgttcagttttaaaatcaaatcttacaaatctctttataaatgcaaaaaagctgcaaaagcccttgtaaatccagaaaagttgcgctaaaatagtaatccgcgctggggtatttcttatttatatgagcgtgctcatgtacgcatatacgcacatgatttggatttttatgatttcgtaattttttgaaacggttttaccggatcacggtatgcggccgcggtccacaggaggtgcatttatctgcaagtattcagagcactgaaaaagggatttttagagcttaccccaaacgaaaaggtcttgcttgttttaacggcttccattttcctcaccgtctatgccgagatgctggcgctgcttttattgccgttttacattgccgccacgaagcagagcttcgttttcttccgccgtaaacaggatttattttttctttcggctttctgggtgctctccctgctcgtcacgattttctcaggcggcaccgtaacggatattctgctcggcgcttttatggtgttcgcattcatcgccgtcattttcgtcagctatacgatgacccagcgcgcgttccgcctcattttatctttcgtctgcctcatgagcccctattgcctccttatcgcgctcgttcagcgcgcgctcggcatggagtgggtttacggtgcgcggtataactccatctttacaaaccccaattactatgcgttttacatttcgctcgtcgtgctcttctgcatctacaacatcgtaaaaagcgaagacacgccgctgcgcggtttatacgctgccctgattccgttgaatcttatcgcgctcgagctcaccgagtgccgcaccactttcatggtgctgctcatcgtctgccctgtcatgctgtggttctgtggcaagaagaagtggctttccgtgtaccttttcaccatgctcggcattttgctcacactcgttctgttcggtgaatcgctcgatttcctcccgcgcatcgatctcatccggcacgattttgcaaaacgcatgagcatctggtcgggcgccattggcagtattatggacgccccgtggttcggccgcggctacaatacatacgcacgcatccatgacctttacggctcatatagcatcgcaaagcattcgcacaacctgcttttggagctcctcatggacttcggatttgtgggtacggcggtcttactcggttactttgccatcaatgtcggcaagattatccgcctgcaccgcagccacaagtgccaccagcgctacgccctcacggtctccgtcatcgtttgcgttctgctgcacgggcttttggatatctccatgctgtggccgcaaaccggtctgctcgtcatttacatcgtcggcttcagcaccgagtacgacaagcagcacatcttcggcacagaccgccgccacgagatttttgcgctgcacgcaagatccattcaggcaaaagaacccatcttgtaaaaaattctgttatcctttacaaaaaggctgccgaaatttcggcggtctttttcttttgtgtctcttttcggataacgcgatttttgttataataaaagagttttggacaataccgcatgaattccccgcggtactgccccctcaatttttcagcaaaggaagatctattttatgggcggttttttcggcgcagcatcgcagactgactgcgttttcgacctttttttcggcattgattaccactcccacctcggcacacgccgcgcgggcatggcggtttacagcccggagaccggctttgacaaggccattcacaacattgaaaacgctccgttccgcacgaagtttacaacggaatcgcaatctatgcacggcacgctcggcatcggctgcatctccgattatgaagcacagccgattttagtgcgttcgcatcacggcaccttcgccattacgaccatcggcaagatcaataacgccaatgagatcgtagaggacatcatcgggcgcggcacgcatttctttgagatgcaaaacggcgaagtgaaccccacagagctcgtcgccgccatcatcgaccagaaagagaatttcatcgacggtattcgctacgcgcaggaggtcgtcgacggttctttgagtatgctcgtcctgacgccgcgcggcatttacgcggcacgcgataaactcggccgcacccccgtcgtgctcggccaaaaggaagacggctactgcgcaagctttgaaagcttcgcgtatttaaacctcggctaccacgacctgcgcgagctcggcccgggcgaagttgtcgtgtttgacgccgaccatgtgcaaacgctcgtcgcccccggcaaaaaaatgaagatctgcacgttcctgtgggtctactacggctacccgtcctccagctacgagggcatctccgtcgagagcatgcgctataactgcggccgcgcgctcgcccgccgcgataacgtccaccccgatattgtcgccggcgtaccggattccggcatcgcgcacgccatcggctatgccaacgagtccggcgtaccgttctcccgcccgttcatcaaatacacgcccacatggccgcgctccttcatgccgacgcaccagagcaagcgcgacctcatcgccaaaatgaaactcatcccggtgcacgacctcattgagggcaagagcctcctgctcatcgatgactccatcgtgcgcggcacacagctgcgcgaaacgaccgagttcctctacgcaagcggcgcaaaagaagtgcacattcgacccgcctgcccgccgctgctcttcggctgcaaatacttaaacttctcccgctccacgtccgaaatggagctcatcacccgccgcgtcattaaagagcttgagggctgcgaccccgaccgcgccacacttgaagaatacgccgacccggacagcgagaagtaccggaagatggtggagaagatcggcgaaaagctgcacttcaccacccttcactaccaccgcctcgacgatatgatggagtccgtcggcatcgacgcagactgcctttgcacctactgctggaacggcaaagagtaatgtaaaaagcatggcaaaagtatttttgatctgcggcaaaatctgcagcggcaagggcttttatacccggcagctcaaggaaaaagaacacgctgtggtgctctcctgcgatgagattgaaaacgacctcttccaccatgacctcggcgaccgccgcgatgcgatcagcgcggacatcaaagcatatctccacaaaaaagccgtggacatcgcccgcgcgggctgcaatgtcattttagattggggcttctggagccgcgaagagtgcacagatgtttctgcctactacaaaaatgccgacatcgacttcgagtggcactacatcgacatttccgatgcagactgggcaaaaaacattgaagcgcgcaacgctgccgttgccgccggtgaaacgaccgactacgccgtagacggcggcctgctgcaaaaaattctcacgctttttgagacccccatacccgatgagatcgacgtgtggtttacaaaccgcagataattttgcacagtacaaaaggacgacagttaagcgcaactgccgtcctttttctatgctctgattgtttttacacttcgccgttaaacagcttttccgcgtagcgcacactgcccatcgcatctttggagtagaaatccgcgccaatctccttagcgtactcgggattcagcaccgcgccgcccaccatgaccttgcagtcatgcgctttgcgcagctggcggatcgtctccgccatgctctccaccgtcgtcgtcatcagggcagaaagccccacaaggcgcacatttttctcgatagccgtctgcacaatgatctccggcggcacgtccttaccgaggtcgagtacgtcaaagccgtagttttcaagcagcaccttcacaatgttcttgccgatatcgtgaatgtcgcccttcacggtcgcaaggatgatggtacccttcttttcctcctgaatgccctttttcgcaaggttctgcttgatgcgctcaaacgcttccttcgctgcgtctgcgctcatgagaagctgcggcaggaacaccgtatttttctcaaagccctgccccacttcgtcgagcgccgggataagctcaccgttgatgatttccagcggcggcgtcgttttcagcatctcgtccgtcagctgtcccgcctgctcgcgcaggcctttcacaatggcgcggtgcagcgaaacgctttcggcagacccgcctgcgctctgctgcgcggcgcccgtgcgcacgtccggcgccgccgtggtgttcgcatacgcttcgatatacgccttgcagcccacgtctatgcccatcagcgcgcagaacgagcggtacgccttcatcagctcgtcgctcaacggattgatgatgccggagcttaatccgcgctgcatcgccatcgcaaagaacgtcgaggtcaccagctcgcgacgcggcagaccgaacgaaatattggaaacgccgagcaccgtgtgcacgccgagcttgtggcggatcgtgtcaagcgcctcgagcgtgataatcgcgttatccgcgcccgtactcaccgtcatcgcaagcgtgtcaataatcacgtcgctgcggtcgatgccgtagctttccgccgttttcaaaatcttctccgcaatcgccacacgctccgcagcagaagccgggatgcccttttcgtcgagcgtcaaagcaaccaccgcagcaccgtactttttcacaagcggcagtaccgtgtgcagcgattcctctttgccgttcacggagttcaccagcggcttgccgttataaatacgcagcgcgcgctccatggcctccacgttcgaggtatcgatctgcaaaggcgtgttcgtcacgctctgcaagttgatgatggccctttccatcaccgcgggctcgtcaagctccggcagacccacgttcacgtccagaatgtccgcaccgtgttccgtctgcgcaatgccttcacggcacagatattccaaatcgccttcgcgcaaagcctgctttaagcgcggcttgcccgtcgggttgatgcgctcgccaatcaaaatcggtcgcgcaccgaacgtcaccgtatgcgtgtacgaggacaccacggtcttcttttcaatgtgacgctccttcaccggcttgtttttcaggcgttctgccagcagtcggatatgctccggcgtcgtgccgcagcagccgccgagaatcgccgcgcctttctccgcaaagcgctccatgtacgcgtaaaattcctccggccccacggggtacgaggtctcgccgttcacggaaaccggcagaccggcgtttgggttgatgacaatgggcaaattcgtcagcgtcagcatttcatcgacaaagctttccatctgctccgggccgaggctgcagttgatgcccaccgcgtccgcaccgaggctctccgccagcagcagcgccgccgggatgttgctgcccgtcaagagctttcccgtgctgtcaaacgtaaacgttacaacgactggcaggtcacagttttcctttgccgccagcagcgccgccttcgcttcgtaggcgtcgctcatcgtctcgatgatcacgaggtcggcgttgtccctgcctgcgataatttcctctttaaaaagctcgtacgcgtcatcaaacgccaaatcaccgaacggcttcaaaagcttgccggaggggccgatgtcgagcgccaccgccgccttgccgccgctcgccgtgtgtgcaagcttcaatgcctgtgagacgacctcctgcacggtgtggcccgtcttttccagttttaaacggttcgcgccgaacatgttcgccgtcaaaatatcgcagcccgcgttcacgtagtcggactgaattttcaaaagcacctcggggtgtgtcaggttccaaagctccggcagctcgccgcccataaggccgtttgcctgcaaaagtgtgcccatgccgccgtccacaatgacaacagattttccgaatcgtcctataacaggatgcataaattttctccctttctctgcgcgtcagatttcgcggaactcgcagtcggtgttcgcgcagccgcggcactttacgtatgtgcatgtcggcgcgtccgtcacgccgatgaccgccgtcacggatttaaacggcaccatcagcatggtgtccgtcagcgtcagcccaatgcgctttgcacattccagccgcgcaaagatctctttttggctttcgagcgcaaagtcgccgtaccccggcgaatagcgcggcttcaaaaataagcccgctgcggcttccttttccgcgatctgcgcctgcatttcgtcacagtagtcttcaatgagcgcattcgcaacggaatgcgccaccgtgccgcgcgccatattgagcgcggataaccgccgtatcatcatatcggcctgcaaacccagcgtcgccgcaaacaaatacgctgccttgcagccgcgtaaatggcgtgaaagctttatgctctcgatgcgccagccgtccagctccaccgcgttctcaagtacttttatgtcgtatcttttatatacgcatttcggcatgagcgtgcgcagcatctcgccgccgatctcgcgaatcatctcatcggtgtctgcatcggccggcttcccgcgaaagccaagatagcgcagcgcctctttctcattcagcttcatagccgtcaatgatctttgaaaggttcgtcatgatgctgcccgcaatgtccgggcggttcatcgtgtagatatgaatatgcgtcacgtcattcgcgatgaggtcgataatctgctcggtcgcgtacgcaatgcccgcctgcttcatcgcctccgggttgttcgcaaaacgatcgacgatcgccttaaagcgcgtcggcatagaagaactcgaaaggctcatgatgcgcttaatctgcttcgcgttcgtcaccggcataatgcccgcaatgaccggcacgcgaatgtcgtggcgcaggagcttgaacatataattataaagaatgttgttgtcaaagaacatctgcgtcgttaaaaactcgcagccgctttccaccttgcggcgcacgccgtcaatatccgcgtcgctgttgtacgattccgggtgtccctccgggtaacatgcgccgccgatgcagaaatccgcaccctcgcggcgaatggcattgatgaggtcgctcgcgtgcgggaacgtctgcggcgccgtatcaccctccggaatatcgccgcgcagcgccagaatattctcaatgccgctcgccttaaacgcattgatggacgctctgaggttctcttcgtcctgtcccacacacgtcaaatgtgccagcgccgtaacgccgcttttctgcacctcttctgcaatggacagtgtgtttttggagttggagccgcccgcgccgtaggtcacgctcataaaagagggcttatgtgccgcgatctcatgcaccacctgctgtgtgttttccaatggcttgcccggcttcggcgggaacatctcgcaagagaccgtcaccttgttggtcttcaaaatatcggaaattctcataagtcatcactttctgtatcggtttcatattttcattgatataccgttaaagtatagcataaaaatgcaggaaacgcaatttgaaaatgcagaatttcgctgttttttccgcttacggttccggccgcatcagtgggaacatcaccgtgtcgcggatattcctcgtgccgagcaaaacctgcaaaacgcggtcaatgcccatgccccagccggaaatgggcggcatgccgtattccatcgccgtcaaatagtcgtcatccatcaccatagcttcctcgtcgccgtccgcgtggctctgcgcctgaatttgcagtctgcggcgctgctcattggggtccacaagctccgagtacgcgttgatgatctccgcgccgttgatgacaagttgaaagcggtccgtaatctccggatcatcatcattcgcgcgcgccagcggcgacaagtccgtcgggtgcgcaatgagaaacgtcggcgcgatcatcttcgggcggctcaccttcttgtataataaatcgatgaggtttccgcgcccaagcttcttcgggtcgtcggtggagtttaattcaatgtgtcggctttcaatttcctgcaataaagcctccgccgtcttaaactcgtcaatgtcaatgccgcagtcctttaaaatgagctcgcggaacgtcaccaccgcccattccgcgccgaaatcgatctcggtgccgttaatggagatgaccgcgctgccccgaatcttcgtgatgaccgtttgcagcatgtcctgcaaaaagcgcatgttgtcgcggtagttatagtacgcgcagtagccctccagcatcgtaaaatcctgcaaatgcgtcgtgtccatgccttcattccgaaagcaccgcgcaaactcaaacaccttcgtaaacccacccacaatggcacgcttcaaatacgtctccggcgcaatgcgcagataaacgtccatgtcaagcgcattgtggtgcgcaacaaacggccgcgccgtcgcgccggacggatgatcgatgagcaccggcgtttcaatttcgatgtagccgttgtcctccaaataccgccgaatctcccgcacaagctgcgacttgaaaaggaaccgcctgcgcgtttccccgttcatgcacaaatcgaggtaccgcctgcgccaacaaagctctgtgtcctgaatactgtggaacttctccggcagcggacggaacgccttgcctaaaaacgtgatgcacttcgcgcgcagcgtcttttcgcccacctttgtcgtgaacatctcgccctccgcgcccataaagtcgcctacgtcaaagcccctcttgaaaaagtcatacgtgtcctcgcccacttcgtcgcgcatcacggcaatttgcagcttgccctccatatcggagagcgtcacaaacgagagcttccccatgcgtcgaatggctgtcacacgccctgcaacgcacacgtcctgcaccccgtccggcagctttgccgcctcgcacagctcatgcgtttgcgcatagcgctccgggtacgggttcacgtgctcccgtacataatgaaactttgcctttcttgcttccaataacgtgttttcgctcattttctacaccctttcgtgctgttattttcatcgggcgggaaatttagagcgtaaaaaatcccgttcacttttgaacagaaccagtaaaacaggacaatagacaaaatcccccctgatgtaggataataagtacatcaggggggattcattatgagcaaacgaagatacaccaatatgcaggttctactaccgaccatagaaaagatgttagaatcagggaagaaccacagggaaatcgaagcggaacttggcttggagggagaccgtccgg

SEQ ID NO: 12 - DNA, 320514 bp, Intestinicoccus colisanans
  source 1..320514: mol_type = genomic DNA
gaatacacaggctgtctggtaaatttcaagacagaaaagccctcttacaaagtcaagcacagcgtagaaaatcccccggagaagcaagtgattttcgagaaccaccacgagcctatcatagacacccagacatgggaacgggtgcaggaacttcgcaagcagcgcaaacgccccaaccgctatgatgaagtgggcttgttctccggcctactgttctgtgcggactgcggcagtgtgatgtatcagcagcgataccagacggacaaacgcaagcaggactgttatatctgcggcaactacaagaaacgcacccatgactgtacggcgcactttatccgcaccgacctcttgaccgctggtgtactctccaatctgcggaaagtgaccagctatgcggcaaagcatgaagcccggtttatgaagctcttgattgagcagaacgaggacgggggcaaacgcaggaacgccgccaagaaaaaggaactggaagccgccgagaaacgcatagccgagttatccgctatcttcaagcggctgtatgaggacagcgtgaccgggcgcatatcagacgagcgtttcacagagctgtcggcagactatgaagcagagcaacgggaactgaaagaaagagccgccgctatccaagcggagctttccaaagcacaggaagccaccgtgaacgcagaaaagtttatgaatgttgtccggcggcataccagctttgaagaacttacccctactctgctgcgggagtttgtagagaaaatcgttgtgcatgagtgcagctatgacgagaacaagacccgcagacaggacattgagatttattattcttttgttggcaaggtggacttgcccgaataaccgcctgacctatccgacacaatgcgcaagtgccggataggaacggcaaaattttttacacttctattacttctttatcacacattagtaaaaagccagggtatgaaacagttgatggctggcggcggtgtcgccctcatcggcatcacccttgtacctctgctctccggcctgttcggttgatcgtctggcggtgatcgcttatgggcggcatactcgacaaactcgatgaatggctccgagggctgctcatcgagggaatcacgggaaacctgtcgggcatgttcgatacggtcaataccaaagtaggcgagatcgccggtgaagtgggacagacgccgctggcatggaacagcggcgtcttttctatgatccgcaacctctctgaaacggtgatcgttccaatcgccggggttatcctgacattcgtaatgtgttatgagctgatccagcttgtgacagagaaaaacaatctgcacgatgtagatacctggatgttcttcaagtggattttcaagaccttctgcgcagttctcattgtgacgaacacatggaatattgtcatgggtatctttgatgtggggcaaagcgttgtgaacagcagcgcaggtgtcatcatcgggaatacctccattgatatcagcagcgttatcacggatatggaggcgcagcttgaagccctgggcacgggagaactgttcgggctgtggttccagtcccttttcgtggggcttaccatgaacgccctttccatctgtatcatgcttgtcatttacggccgcatgatcgaggtgtatttgacaacttccattggaccgatcccgcttgccactatgacaaaccgggattggagccatacaggacagaactacttgaaatccctgtttgcattggcgttccaggcatttctaatcatggtgtgcgtggcgatactctgttttggtacagagtatcgccacggacggaaatatctcaggcgcgatatgggcctgcatgggctacacggtcctgctgtgcttcgccctgttcaagaccggcagcctctctaagagcctgttcggagcgcattaaggaggcttgataaattggcgtatgtaaccattccaaaggatttgacgaaagtaaaatccaaagtgctgtttgggcttaccaaacggcagcttatatgtttcggagcggcggcactcatcggagtaccgcttttctttttgctcagacgcacggccagcaacagcgccgccgcgttctgcatgattatcgtcatgctcccgttctttctactcgccatgtatgagcggcacggccaacccctggaggtagtagccggacaggtcatccgctgtatgttcctgcggacgaaagaacgaccttaccagacaaacaatttctacgcagccctggagcggcaggcccaggcggaaaaggaggtgaaagccattgttcagaaagcgaaagccagagccgcaggcacggcagacggcaaaaccagcggtaaagctgaccgccgcagaaaagcgtgagatcagccgtatcctggaaaccgccagaggcgacggcaaggtacattccgcacaggacaccttaccgttccgccagatgtacccggacggtctgtgcaagctggacgatcacacctggtcgaagtgtatcgagttcgaggatgtgaattatcagcttgcaaagcctgacgaccagacggcgatctttgaagccctctgcgatatgtataacgcccatgacgcttctatcgggatgcagctctcccttgtgagccgccgcatgaaccgggaggattttgtgaagcgtatcgagatcgcggcgcagggagatcacttcgaccatatccgtgagctttacacacaaatgctccgcaagcagcttgaacggggcaacaacggtcttatcaaaacaaagtatctgaccctcaccatcgaggcacgggacagcaaaaccgcacgggcacgattttcccggatcgtcatggacgccctcaaccatttcaaggtcatgggcgctctggcaaaagagcttggcggcaaggagtggctggaaatgctccacggcatcctgcacccggacggggaacggtttgcctttgaatggagctggcttgccccttccggcctgtcggtccaggattttatcgcaccttcttctttccgcttcggtgaagcaaggaagttcacgatggcggataaattctgtgctgtgtcctttctgcagatcaacgcaccggaaatggatgaccgtatgctcactgaactgctggatacggacagcgggctgcttgtcagcctccatatccgcagcatggatcagaacgaggcgatcaaaacggtcaagcggaagatcaccgacattgacagtatgaagatcgacgcacagaaaaaggcggtgcgggaaggtttcgatatggatatcatccccactgaccttgccacctacgcaggcgaggcaaagaatatcctccgtgacctgcaaagcagaaatgagcgaatgttcctgatgaccttcctggtggtaaattttgcagacagcaagcaaaagctggagaatgatcttctccgtgcggcaagcgtggcgcagaaatataactgttccctggtacggctggactttcagcaggaggacggcttcgtgtcggctctgcccctgggtgtcaaccgcattaagatacagcgtgggcttaccacttcggcggtggcggtgttcgttcccttcaccacacaggagattttccacggcggcgaagctctctactacgggctcaatgccacttccggcaacatgatccttgctgaccgcaaaaagctgaaaacacccaacggcatgatcttaggcacacccggcagcggtaagagcttttccgcaaagcgttccatcgtgggtgtgttcctgaacacaaaggacgatatcctgatctgcgacccggaggcggaatattttccgctggtgaaccgtctggaaggacaggtcatcaaaatctcacctaccagcacgcagtatgtgaaccctatggatatcaacctcaattacagcgaggatgataacccgctggcgctgaaatctgactttatcttgtcgttctgcgaactggcggcaggtggccggaacggtctggacccggtggaaaagacggtcattgaccgtgccgtgcggatcgtatatcgcccctatatcgcagacccccgcccggagaatatgccgctgttggaagatttgtatgacgagatcaagcggcagccggagccggaggcacagcggatcgcggcggcactggaactgtatgtgcatggcagcctgaatgtttttaaccaccgtaccaacgtggatatcaacaaccgcattgtctgcttcgatatcaaggagctgggaaagcagctcaaaagcctgggtatgctggtgatccaggaccaggtatggaaccgtgtttcccaaaaccgggatcagggtaaatccacctggtacttcgtggacgagttccaccttctgctgcggggcgaggttggttcctggagcgtggagatttggaaacgctttcgcaaatggggcggtatccccacgggaattacgcagaacatcaaggacctgctttcctccccagagatcgagaacatctttgaaaacagcgattttgtgtaccttctgaaccaggccagcggagacaggaaaatcctttgcgagcgcctgaatatctccaaccagcaggcggcacatatcagcaacgcaggccccggcgaggggctgatcttcttcggcaatgtgatcctgccttttgtggatgacttcccgaaggacaatgaactttacagcattatgacaacaaaacttggtgaaaccgggaaaggagaaaacgaacatgagtgatccccgctatttgcatacggaagaaaaacaggagggcgaaaccttctttgatgtgatgaaccggctgattgccagaagcaagacggtcacggcggatatggaggcggttcttacggagctggaaagtgagatcgaaccgttccgtgcaccgaagggtcatgaataaactgacccatgtgagcctgttttccggcattggcggtctggacctggcggcggaggctgctgggtttgaaaccgtctgccagtgtgagtgggcggattttccgcactccgtcctctccgcacgatggccggatgttcccaggttccgggatatcactactttcacgaaggaggcgttttttgaaaaaacaggacttgaaacagttaccgtcatctcaggcggctttccctgtcagcccttctccaccgccggaaaacggaagggctttgcggatgaacgctacctgtggccggaaatgtgccgcattattaccgagctgcggccccgttgggtgcttggggaaaatgttgctggcttcatcaatatggggctcgacaaaacgatctttgacctggcaaaagcgggatacgctgttctcccattcgtatttccggcttgcggcgtcggcgcatggcatgagcgccagcgaacttttatcgtcgcggctgatgtttcccacaccccttgcctccgacaacaacaccgccagggacgcggcaagcctggatgtgttcctggcggacaatgggatattccgcaagaggaaccgaaacggggcgatctggagcctcagcctgtcggcggcggtattctatctgaccccggtggcgtcggacggtttccgctcgaccttgaagccgtcggccttcgatccggcgaagaaggacgggaacctttcagcgcagatcatctcccaggaacggccggtgtccgaaacatcggcgctgaacccggattgggtggaatggctcatgggcttcccgaaaggatggacggacgtatcctctggaccgccgaaccggaaggaatcccccgcatgaccgagcgcatggatgaccgtgcactgcggctgaaaactttgggcaatgcggtctgcccgccccaggcctatcccattttccgctatatcgccatgattgagaatggcacctgcggcgacttttgcccctatggaaaggaaggtgactgcctatgagggaactgaaagcgaccgataagatcacgcagaaaatgacccgtgacggtgcggtatcggaaaaccttgccacgggagaggtggaacatatcagcagccgggaaccggaaacggagttgtccgcttcttcggaagaatctgctggcacggctgctgaccttgccctgcgtgcggcggagcaccatgagaagaaaaccgcacgaaaggcggaaaaggctgacacccaggcagtgcgggatggttctgccgcaaggcagcgcccgtcctcccgcctgcaatttaccgaggaagaacgtgccgatcccatacttggaaagtacatcgaccgttccgaccgtgcggcggacaaattggatgcggcaaaagcagccatccccacaaagaaagtccttcgcaccgagcgtatttttgacgagacagccggaaaaggcaaaacgcagcttcactttgaagaaatggagaaacgccccaacggacgcctgcggcacaatccgctttcccggccggtccatgagatcgtccacgccgcccatgcgaaggtgcatgaggtggaacaggaaaatgtgggtgttgaggccggacacaagggcgaggtgctgacggaacgcgggcttgcctacggaaaaggcaaagtccgtgccgccgtccaccatcaccgcacaaagccctggcgtgacgcggcgaaggcagagcaggcttcttttaaggcaaacgccgaatacctttatcaaaaggcactgcatgatgatcctgcattggcagcttctaacccggtatctcgttttctgcagaaacagcggatcaagcggaactatgcaaaagagctgcggcaggcagagaaaaccgcaaagaacacagcggccacggcgaaaagtgcggcgcagaaagcaaaggacgccttcaaggaaacattcctctacatcaagcaccatagccggacggtgctgctggtgatcggcattggcgcctgtgttgctctgctgtttggcggagtttcttcctgttccatgatggcgggctctggcgtgggtggtgtatttacttcctcttatctctccgaggatgcggatatgctggctgcggaggcggcctactgcgagttggagcaggaacttcaatatgagctggaccactatgagactctgcaccccggatatgacgaataccgttttgatctggacgagatcgagcatgacccttatgtgctgatctccattctcacggcgttccatgaaggggtgtttaccatcgacgaggttcaggaggaactgcaaatgctctttgaaaagcagtacatcctgacgcagaccgtggaggtggaggtacgctatcggacggagacacggacagacagcgaaggaaacgactatgacgtggaagtaccatacaactactatatttgcaatgtgaagctggaaaacttcgacctttcccatgtgccggtctacatcatggacgaagaaacgctttccctgtatgcggtctatatggcgacgctggggaaccgggaagatttgttcccaggctccggctatgtagacaagtacaccaaaccgccaaccacctatgatatcccgccttccgcactggaagatgaaacctttgcggcgctcattaccgaggcagagaagtacatcggatatccttatgtctggggcggcagcaatcccaacacttcttttgattgctccggcttcgtgtcctgggtgctgacgcaaagcggcgtctgcaatacgggcaggctgggagcccaaggactctacaatatttccaccccggtatcctctgccaacgcaagacccggcgacctgatctttttcgtcggtacttacgatacaccgggcgtttcccatgtgggtatctatgtgggcggtggaaaaatgctgcactgcggtgaccccatccaatatgcagatatcaacacaagctactggcaatcccacttttacgctttcgggcgaccgccctacaactaaaaaacgatatggaggtaatttgatttatggcaacgacacagaagatccgcaatgacattgcgaaaaccaaagaaaagatcgcggaacagcagaaacgccttcgcgcgctggaggcgcagcttgcggaggaagaaaatctggaaatcgtccgcatggtgaaagccgtgaagatggataacaaggaactgaccgccttcctgaaagcctatgccagcggtatgatctccctgccggaaggtatgctgcaggagggcaacaccgagaatgaggaaacggagggatacgaggatgaagcataactttatgacaaaaatggtatcggctcttttggcggtggtgctcagcactgccgctttttctgtcactgcctttgccagcggcggcgaggaaaccacggagcccgtggctgaacaggaaacggccggggatgtttctgatctgctttccgctttggcgggcagccaagttacggtattcgtcaccgaggatggtatccagttcagttccagtgaaaatgactccgggcagatcggtactgtcaccacgggtggcggcaatttgaatgtccgcacgggcgcgggaatggactacaccgccttcacccagcttcccaatggaacgaccgtgaaggtgattggcacggacggcgactggctgaaggtcatcctgccggagaaagtcggctatgtctattccggatacatgacggtaagtgacggcgaggctggctccggggaaggttctttctctctggatgcggaaacactggaaaatctgctggggatgctgggcggcggtctgaatggtggtgccgccctaacgccggatgggaacctgtcactgattgacgatattggcagcccgaccgccagcggcaagcagtttattacagcggaaacgaagaacggcaatgtgttctatctcattatcgaccgtgacgacgagggcgaggaaaccgtgcattttctgaaccaggtggatgaagccgacctcctggcgctcacggaggacggagaaaaggcggaaacacctattgtctgcacctgtacggagaagtgccaggccggagcagtcaataccgcttgcccggtctgcgtaaaaaaccttagtgaatgtattggcacagagcagaaagctgtggagcccgccgagccagacaatccggagcctgaaaagaaaggcaatgccggggcaatcctggcggtgctgctgatccttgcagccggaggtggtgcggcggtctatttcctggtactgaaaccgaagcagggaaagaaggttcccgctgttctggatgatttcgacctggaggatgaagaagaatacctgaccgaggacgaggaaacggaggaaaagaatgagtaaactgattattgcggaaaaaccgagtgtggcaaaatctatcgcgtcggccttgggtgcttcatccagggccgatggcttttatgagggcagtggccttctcgtatcctggtgcgtggggcacctggtatccccaatggatgcgggcggctatgacgagcgtttcaagaaatggcgttatgatgatcttcccattctgccggagccgttccgctatgtgctggcaccgggcaaggaggacgcatttgaaaatctacgcgccctgatggaccgacccgacgtggatactatcgtcaatgcctgtgacgccgggcgggaaggggagctgatcttccgtctggtgtatgaaatggccggctgccgcaagccggttcttcggctctggatttcctcgatggaggacagcgctatccgggagggcttttctgatctgcgtcccggtgccgattatgaagccctgtatcaatcagccctctgccgccagaaagcggattggctggtggggatcaatgccacgcgccttttctccgttctctatcaccgcaccttgaatgtgggccgtgtgcaaacacccacgctggcaatgctggcggagcgtgacgcaaagatcacgctgtttcacaaggaaaaatatcatctgctgcgcctgacgctggatggagccgaggcggtgtcggagaaattcaccgattcggcagcggcggaacaggcagcggtcatgtgcaagggtgcgaccgtcacctgtacctctgttacccgtgagcagaagaaagagcaaccgccgaaactctatgaccttaccaccttgcagcgtgaggcgaaccgcctgttcggatacacggcgaagcagactctcgactacgcacagagcctctacgaaaagaagctgctgacctatccccgcacggacagccggtatctgacttccgacatggcggaaacggcatcctgtgtgatccacctggcggcaaagctgccgccctttgatggttgcacaaacttcttcccgctggtggaggccatgatctccgacaaggaggtatctgaccatcacgccattatcccgaccatggagattgaaaaatcggatatcaaggctttgcctctgggcgagcgcaacttgtttctgttggtctgctgcaagctgctgtgtgcgtcggcaagtccgtatgagtatgaggcagtcaccgccacctttgactgcggcggccattccttcaccgcaaagggcaagcgcatccttgccgaaggctggcgagagatcgaccgcattttccgtgcctttctgaaagaaaagcctgcggatggggacggcggcacgctcccggacttcaccgaagggcagacttttgacggcgcgaaggtttccgttaccgagcatttcacccagccgccgaagccctacaccgatgtgatattttgtgagcgtaaggagtggataggaattgaagaaaggagttcagcatgagaagaaaaaaagataaaagcaatggcattactgctttgtatgaaagactgtctcgtgatgatgataatgctggagagagtaacagtatagttcatcaaaagcaaatgcttgaagattatgctatgaaacatggttttacgaatcttgttcattttaccgatgatggttggagtggagcgacctttgacagaccttcatggaacagacttgttgaaggtgttaaaaacggagaaatcactgcctgtatctgcaaagatatgtccagaatcggcagagaccatttgcaagtaggttttttcactgacattctgtttagagaaaaggaagttcgatttatagcaatcaataatggtattgacagtgaccgtcaagaaaccagtgagtttgccccttttctgaatatcatgaatgagtggtttgtcagggacacaagtaagaaaattaaagctgtactgaaatccagaggttcttccggcaacgctcatacaagtaatatcccaccatacggctatttgaaagaccccgaaaaccccgaccattggattattgatgaagaagctgctgaagtagtccgcagaatttatcgcatgactattgagggaaaaggaccttatcagatagcaagagaactttcagaagaaaaaattgaaagaccatcttattatcttggcaaaaagggacttggaaatcatgcaagcaactatgacaaagaaaatccgtatatgtggcgaggaaatcaggttactactctgattgcccgaccagagtatatcggaaagactgtcaacttcaggacattcaaaaattcctataaggacaaaaagacgaaaagggcagataaggaagattgggtggtttttgatgatacacaagagcctattgtcgatgaagaaacatggctgcttgctcaaaagttaagacagaatgtaagaaaagcagatcctatgggcgagcctaatgttctgaccggaaagatttactgtgctgattgtggtgcgccgatgtataatcacaggcagcggaaagggcgagaaagaatatactatactgccaaaggcgaaaaaaggacaagttattccaatccggcagattgttatgaatgttccacatataatcttgcttatcagaagtatgaccgacattgtacttgccaccatatttcaacaaaagcacttaaaagcatcattctgaaaaccatacaggagacttgccattatgtttctttgaatgagcgggagtttgtttattctctgcaagaagaatcggcgatgaaagatattgctgtttctgaaactgtaaaaaaccgcattgaaagaaatcagaagcgagttcacgaactggatatgcttatcaggaaaatctatgaagataatgtgattggaagattgccggacagactttttcagagtatgcttactgattatgaaaatgagcagaacgagctgaacaagattattgagactgacaccgctgatatgcaacggattataggcggtcaaaataatgtggagcgttttctaaagctggttaaaaagtatgagaatattacagaacttactcctgccatgataaatgaatttatcgacaaaattctggttcacgagccacaaggaaaaggtgcagaccgcaccacagaggtggagatatatcttaactatgtcgggcaatttcaagtacctgtggagcagcatgaaccaacagaggaagaaaggattgctgctgaaaaagaggcggaacgacttcgcagaaaacgagaatccaatcgtaagtatatgaaaaagattcgtgagaaatcaaaagaatttgcggagcatgagcgtatagcagaagaaaaaagttctgatagcaatgtgtgtgttgaacagaacgtcacaagcaaatcaaatcggcaaaaagtgaaaggagaaaaaatagcatgacagaattgaaatcacgaatccatgacaaaagcaacggtctggactatgttcttgtgggcgattactatgtgccggacttgaagctaccggaggaacaccgccctatcggtatgtggggcagactgcacaggacatatttggagcagtaccgccctacaaggttctctgccctctgtttatccggcgaactgcatacttaccttgctgacctggacgaacaggcaacggaaaggtgcagccttatcattgagcagatgaaacaagccgagggcgtgaccgaaaccatgaaagcagacaatcagatgttgtgggtacagtccatgaactctatccgtaaccgagccgaagaaatcatcagacaggaaatgatttactgctgattttatcaagtccaaaaccaacaaatttgtatcgtaaacgaagcgacaggtatttccttatgaagtgtctgtcgcttttcatttatcaaactttaaggaggaaaacacaatgaagatgaaccggaatgaaatggaagccctttatgcctttggctgtccgaacctgaaagcaactgtcgagcgtttgcgtatggtagctgcccttgcacccgatccagtggcgaagaagctgttttatatgctttccgtcaagctgagtgctgagggtgttgaaaggtggtatcgctgcttttactgcaagctgcgtgtgttgaaaaaccatagggagggctgctatgacgagactgacgaagattgagaaagaaacaatcgttctctttaatgagggcgaggacaaggcaaatatctacacccacaacgccggattgaaaaagaggttggctgcttttgctaagaagtaccctgacctttgccgactggaaaaatccaatgttcaaggcggtgtttcttatgagctggcaaagtcccgtctgtctatccgtttcctgccgccttacagtgaggaacgcagacagaaagccagcgaatatgcgaaaaagcatgggctgaacagccagcagggataatgtgataatcagggctgatatgcggttaaaatgtcaggtgcagacctgatgttttgaccgttgcctatcgcctgtgaggaaagtatcggggactatggattttgcggaaatgtgcgttacaaggcttgaacaggaactctgtacacaaaattttttcttccattctttaagttgatgaagtataatgagatatgaaaaattgaggtttttaatactcgatttcaaacaatcatttttatatagctggaactatggagggcaaaaatgaataattttttacgaatgtgtttgaatataattacacaaataggtccctatttagttgtacttcttcttttgaaatatcttgtaaatcttcaacaaaagagagctaaagaacgagaggaagaacagaaaaagggaataattaggacgcattatataataaaaaccgaaaaagtacttactatgttttttgtattggcggtgtttctttttgggggagctacggtagccagtgctattcaacaagatgatttattgccaccaattggttttagtattttctttattgtttctttaatcggctcattgaacatgattatgtggaaactggaagtgaacggagatgaaatcacatggcgttcaacttttggaagaaagagaacttttcactttgaagatattacctattgcgagagaaagaaaggttctatgcgtgtatatgtaaatggagaaaaattatttaccattgatagtaatattgacaaagaagaatttatggaggacataaaaagaagaagaatccctgtaaaatcttactgggcaaatcagcataagaaaaatcgtaaatgacatagattttataacagtacgatgttagacaactgaatatgaccgtcaaggtcagatgaagaaaccgatgtattgagcgtaaagcgatcatgcgtcggtttttcttatttcatgagctgacagaattccgactgtatatcacccgtgaggaaagtatcggggactatggattttgcagaaatgtgcgttacaggtaagtaaaaaaactacttgatagagtgtaaattgaattgttcatatcggtatgatataatttactgaaatgaagcaagaaggtggacttttgtatgaaaaaatttttgaaaatattgctaatcgttataggaatagtttttttgatttttgcagcgctgatatgtattggactgtttgttgattatgatgaccatattgaaaatggtcgttatacttatgttccggaagaagaaaacaaaggaaatgagtatatcgagtttaagttgacagataatggaaaagacgattctaaacttacatattataattctatcgaagaagctattttgaattcccccttaaaagcagaacatgaagatttatcagctccagaagattttcttaatcatgttgatgaaatattgcatatatggaatggcaaacagtatgatacgattttctatcgagcaggaagtgataacgatcccgttcaaggttttgtgattgcacgctgcaaaaaacagatagaaaatgaaagtacacaatatgcgtttgtaaatgccacaccatctgccactacaccagataccacttatgggggagacttcaaaaaatttatccatttatctttaacaataagtgatattcaacaagacttaaatccaaattatccagataccagattcgtttttggctatgcacatgataaagaaatttactcattagaagtagagggtcaaaagccagatggaattatagaatatgaagaatatggtagaacgatgtatatgtggtattataacgatttggaaagcaataaaagaggcgattgtctgagctactcagtagatgtgccagaataatttttcaaattggctaatctgccacaactgaatatgaccgttaaggtcagatgaagaaaccgatgtattgagcgtaaagcgatcatgcgtcggtttttctttttgcaaaatagtccggtggactgttttgcaaaaccgaaggaactgacagagcttgagacggggcgaagtcagtttgttcgggcgggagtacagagggtgcaaccctttgtgcatgggtacagggaatgcaatacccctgtgcaggtcaagggcggcagccttgcccagttaagtggcgtttcgccacttagtactgggtattacttgacgcagaaagccgcaaggaatcagcttcgctgcccttctcccctgtcggggaaatcaaaaagaaaaggaggaactcatgtgaaattaacaagacacaatggacgagctggaaagaatggcgtttataatccgaagcacaatgaccgcagttttgacattgccaacagcgaacacattgacgaagaacgagccaaacaaaatctctattgggactgttacaatggcttccgcaatttcaaaaatcccgataaggaaaatgagctgtctgccacttttgaagatgtggaacagcttttttatcgtcagcggtatcgtgattttgtaaccggacagaacgaaagaaatgtgaagaaccgacaccctgaaaggaataaggaaaccggtgatttgctcaaaagcaaaaagacctgtccagaggaaacggtctatcagattggaacacttgataatcatgttccaccggaactgctcattgagattgtcacagaatttatggaaatcgtaaatgagcgtttcggctctcatgtccatatcctgaattgggcgctgcacttggatgaaagcacccctcatattcacgagcgtcatgtgttcgactgtgaaaatcaatatggggagattgccccacaacaggaaaaggctttggaagcactgggatttgaactgccggaaccggagaagcctgtcggaagaaaaaataaccgcaagatgactttcgattcagcctgccgagtgttgctgttcgatgtggcgaaaaagcatggcttacaactggaagaagaacccgaatatggtggtcgtgcttatctggaaaaacaggactatattcttttcaagcaaaaggagcaactggcagcacaggagcaaaagttggaagaactcacgatgaagattgaagatgtggaagctctggtggacgaggttgccgatattgcctatgacaaggcggttgaggtcgttgctgatactgtaaaactggaaacgcacaaggaggatattaagctggtggagcagtctaaagcgtgggttctctcccctgagcgtaaggcttcaaagaaagaagttgagtatgcagtgaaacgattggatggcgtgattgccagaatcacaaacgctatgaaatcaaccattcagaaaatccaaaccacgctgatgaaaccggaggtcaaaaaagccggaacggagcaaatcaagaagaaagctaaaagttccattatagagcagttgagccgcaaaaagaaagaaatagcagagcgtgaagtcagccggacggatcaggcaaaaagcaaaaaacaggatatggaactctaaagcacttgctgttttcactttgaaaatgacaggtgcttttgctttagggagtaagaaaatatcttccattctttaggttgatgaagtataatgatagtaagaaatttttttgtaatgaccttaatccaataagtgattttgcaattattcagtaaaggatgtaattatatgaaaaaagtattgttgctttccagtgtgattattatactcggtttaacaggctgctctaacaaatatttcaatgactggtttagctctgaacaaaatgaaacggataagatgtgtcaacaaattatcgaggcatgtaagcaacaggattcagagaaactaaaatctctattttccgaagaaagcaaaaagaacattgagaatttagacactgaaatctctgcttttttcgattatattgagggcagtatccaaaggtttgagggcgattgtgcatcatcaagtgaaagcaactatggtaaaaggaaaacggaattggatggtatgtatctcatattgacagagaaggaaaggtattgtatgaatttttatatgtatagtcaggatgatgaaaatgcccaaaatgtggggatatataaaattgaaattgcattggagagcgaagtggctgaggataattttatatgggataatcccccaaacggtatttttgttggaggacaaaattgatttttgttatgagagaacattaaagtataaatttcggatggtataagaaaaactgactacaattaaatcttcacagctttactaagcaggaaatctgaaaagttctcctgcttttttgcactcaaaatagaatgtggaactctaagacacttgctgtcttcgttttgaaaatgacaggtgcttttgctttgggaggcaagaaaaaatcttccattctttaggttgatgaagtataatgtaagcaacaaacttgaagtttaaggggatgatattatggattttgctatatttagattgtttataagagtttcattatttgttatagcgttaattgcttgcattatctatctaattaaaaaaagaaaacttatctattcgatattttttgataaagaagcgataaaaaaagaatatactggaaaaaatgatataatatttcttcgattggctaataccattcttgttatagtagctattcttttaatcttatatttgaaagattttgttttagatatgccttacatcataaacaaacagtatagttatgcagaaggatatgtaactgaacaatctcatggtggtgcagatatatcttctgaaagaagaagtgtttttctatatgataaagttaaagatgatgaaatcgaaatcacagtattttcaaggtatattgataaaaatacttatttaaaggtacaatatcttccgcatacgaaatatggtgctattgtagaaattaaataattcattctaaaaagaaaatttccagtttgtataactggcaacccaaccacaattaaatcttcacagctttgctaagcaggaaatctgaaaaggtctcctgcttttttgcacctaaaattaaatatggaactctaaggcacttgctgttttcgttttgaaaatgacaggtgcttttttcgtttcaggaaaggagtcacatgaatgtatttgaagttgtaaaagaaaatgttactgcccgacaagccgcagaagcctatggcttgaaagtgggtcgcacaggtatggcgtgctgtccgtttcactcagataagtcccccagtatgaagctggatgaacgctattactgttttggctgcggagcaaccggagacgctgttgatctcacagcgaagctattcggtatcgggctgagggaagctgctgtcaaacttgctgaagattttggtcttaactatgacagccgacaaaagcccagtgtccgccctcgtattcgtgagccgacaccggaacagaagtatcaaaaaggagaaaatcattgctacaaggtgctgacggattattttcatcttcttagagaatgggaaaagaaatacgctcctaaacagccggatgaggaatggaatcccctgtttgcagaagcactgcataagaagaactatatcgaatatctgcttgatattcttctgtatggttcattggaggaacgaaaagcacttgtggcagaacagagaaaggaggtgttaaaacttgaacagcgaattgcagaactgtcagcagacagaaccatgcacagtagaagaaatccgaaacagcttagagcagagcgagaaaggtaaggtttataatactgccgcaaattataagcgtgttctgcaatatgacccgcttttgaaaggggctatccgaaaaaatcttctgaccgaaagaatcgacattgtgaagcccctcggttggtatcgtgacagcccgacattgacggatgtggatgtgaaatatctgctcctatattttgaagaaaactatggattgaccgtagagaagaaaatcatagacgcagttgcggttattgccaatgaaaaccgttaccaccctgtctgtgattttctcaatgccttgcaatgggacggaacggaacgcatacgcttctgtctgcaccgctttctcggttctgatacagatgattacacctatgaagcattgaagttgtttctgttgggtgctatctcacgagcctttaagccggggtgtaaatttgaggtaatgctctgtcttgtaggcggtcagggagccggaaagtcctctttcttccgtttgcttgcggtcaatgatgactggttctctgatgatttgaaaaagctggatgatgaaaatgtgtaccgcaaaatgcaggggcattggattattgaaatgtcggaaatgattgcaactgccaacgctaagagcattgaagaaatcaagtcctttctgagccgacaaaaggaaacctataagataccctatgaaacacatccggcagacagaaaacgacaatgtgtgtttggaggttcttctaatacccttgactttcttccccttgaccgaacaggcaaccgccgcttcgttccggttatggtctatcctgaaagggctgaggttcatattttggcggatgaacaggcttccagagagtatatcaatcagatgtgggcagaagctatggagatttacagaagcggcaatttccgtctgagattcagtccggctatgaacgcttatctgaaagcccaccaaaaggactttatgccggaggacacaaaggcaggacagattttagattatctggaacgctattccggcagcatagtctgcttcaaacagctttacaaagaagcactggggcatgattatgacgaaccgaaacaatgggaactgcgagagatcaatgacattatgaataacgctgtcacaggctggagggcgttcagcaatccgaggtattttccagagccttaccgcagacaaaaaggctgggagcgtatcaggaacgacaacgagcctgacaacagcatggatggttttcaagaaatcccgacagaggaaatggaacagttagggcttccggaagaatggttgaagcaaaaataaaagccagttgtcgcttcggttgtcgagccggttgtcggtctggttgtcgggtaaaaatcccgaaagccttgatattgcggcacttttccctctctgacaaccatgacaaccaatattataaagaaaaaggaaatagtaaaaagatagtatcgcccgataaagaaaaaaggttttctgatgtccgttgtcggaacttcgttgtcagacctttccttgtcgggcttttttcatttaaggaggaatatcgtatgacaaatattgtgaacagtacactacccacccaaaataaccattcggagaaaaacaaaccggatggagtttttgtgattaagcaaggcaaaacaaattataaagtcaaagtgttttttgaccatagtagcggtttgactgcggaggacaggttgaaacgcattattcaggcagaagcagagagagaatctgcgtaagtaatatgaaaaatatccacgcacccccttgacaaaagctttcagaagataccctcctgtccgctatggaaaatgcgggtaaggacgatatccccgacgaggcggagcgaaagggacttggcacgcctgcaaccagggcggcaatcatcgaaaagctggtggcagccggatttgtggaacgcaagggcaagagcctgatccccacaaaagccggtatcaaccttgtcacggtcctgccggagccgctgacctctcccatgctgacggcggaatgggaacaaaaattgacggagatcgcaaagggcggcgctgacccggataccttcatggacggtatccgcacgatggtccaggagatcgtgtccacctattcctgcatttccgaggatggcaaaaagctgtttgccccggagaaggaagtgatcggcacctgcccccgctgcggccagccggtctatgagggcaagaagaactttgcgtgttcggatcggtcctgcggtttcgtcctctggaaaaacgaccgcttctggacgagccgcaagaaggaactgacaaagaagatggcagcggaccttttaaaaaagggacgtaccaatgtcaaggaaatgtggtctgaaaagaaacaggctgcttatgacgctgcggtgattctggatgacacgggcggcaagtacatcaattttaagctggaatttccgaaaagaaaggttggtgctgatggcagaaaataagactttggaacatttacccgaagtgagggcggcggtggctgccctctccccggaggatcgggaactgttggcggcggtgcaggtctcgcccttcaagctgacagcaccggaacagttcaaggagtttgctgacaacatcgactatttcgtatttgagccaaacatccacgacctgaacgatctgggctggcggtatctggcacagcacatggatacgccgttacccccggaacttctgaaagcaatcgaccctgttccttttggcaagtacgccatgcaggaggaacagggccattttacggaacacggatatatttctctctccggcgacgagtggaaccatgagcgccctgcggagccggagaaaaagccctccatccgggaacggctggaacagggcaagaaggaatgtgcggagaaaaacaaggcacagccacacaaggaaaaggctgcgccggaactgtaaggaggtgctgatatgccgtattacgatcacgacaaggattatccctttgccgcctttatcaccaatcttgggaagtacaatgagggcgagcttgtgggcgagtgggtgaagtttcccaccaccgccgaggaattgaaggaagtatttaagcgtatcgggatcggccagaaggatgacttcggccagccctatgaggaatggttcatcacggactatgactgctatgtggacggtctttacagcaagctgggtgaatatgagaatctggacgagctgaattatctggcgtcgaagctggatgaaatgagcgaaagcgaatacgcacagtttcaggccggtatggaaatgggcgaccattgcggcagcctgcaggagatcatcaacctcaccgagaatctggattgctatgaggtttaccccgatatccatgactatgacgatctgggccgctattacatcgaagaactggacgttatgcaggtgccagagcatttgcagaattacatcgactatgaggcctacggtcgggacgttgcgttggaggaaaacggcaccttcacggatcagggctatgtgcgtgatacgggtgacagtttccatgagtattacgacggtgagcgtggcagtatccccgacgagtaccgggtaatgacttttcaggacgatcttcccgaagaagaaaaatctgaatgggctatggatattgcctttgacatggacgagtttttccgtcagaacgatccgcagtatgcggcggagcacccggaggcacaggctgccaaggaggaactttacgaaaacctgatggcagggcgcatttccgctctggatgaaaagctggcggcgctggggcagacgcaggaggactatcttccttcggagatcgaaaaattcaaggatgccacgggctatgaggaatttcttgattttgatccggcggaggtcaaggccgctttggaggacccggagaagtcccatgcggatgaaatgctgtccgctgcggagaaggttgcctcggaaaagatgactgtgcttgtagtggaacctatgaaggaaccctatgtgaaggagatcgaccccgaccttcattccctgcaggcagaggttggcggtgatattggggcaacctatccctattctgacccggtggcgctggtctgcaatgatgaaggaaagctcatcgggcttgatctgaaccgtgggctgcgggatgaaaatggagaaatttatgatatcgtagcagggacttttttggtggttgggcttggtgaggaagattttgcctccctgtcccctgaactgattcagaaatacacggaacagttcaaaacgccagaacgatttatgcagatcaatggcaatatcgttgttcttcctgtcccagcagagaagcaagacctcacttttctgccagaccgttttgagaccggcgagcgtgtgcagacaccgaggggcagctttcaggtgacggccatgagccgggagcagatggaggcggccggttacggtgtccaccatatttccgatgatggaaagtatcttatcatgggaaacggcacacgggcctttgccgtggcagcggagcagccggaaaaggacaatcctctccgcacggcagaaatgacgctggaggatgactacggcatgatcgacggcgttatcaacaacggcagacgcggcgaggaactggagaaggcgcaggaacacgcggagcagacgaagccggagaagccttccatccgtgagcggttagaggacgccaaacgggagtgtgccgagcataagccaccggagggcaagaagcccggccgtgatgtgccggagcatgactgcctatgagccgaagcaagaaatggcggctggaatgggcgttcttcctgggtgacaacggcaggcggcagtataaccatatctgtaaaaaatgtgttcacggctgcaagcagagtttccgggcgtgtctggtcgcttgcccgcattacagttccaaacggtctaaaatctgtgaggataagggggcgaaaaacgcagaataattccctgtattcgtattttcaaagggagcctttatgatttttcatgtgtcggtctgcttgctggaacatggagaaaaaggcttgatttcaaacactttctgatacataaaacgggagtacagcttttcggtttgtccgattgactgtactcccgcttttttatttgttttcgtcattatcaggtttttccgtttccgctacactttctatcatgtcaacgactacggcattaagctgtgcggcgttctgcgatgtaatgactggtcgcccggtatccttttcaatatcctgtcgaacctgaccggcatagctgccgccacgacgggcaatcttctgactttcagaaaatccttccggctgatgtgcttttgacagttctgtggttgttgcctctgcaagcatattcagaacaatttccatcgtactcatattatcacggaggttttcctttttcagaccttttaatttcttatattgccgagtagtcatgccggaccatgctttcgtaatctcatcggtgagaatggcatactcttttccttgctgcacgccacgctcctgccattcagcggtaagctcgttacggacacggatggaaaggagccgctgatgaatccagtctgtatcatagccttttttctgataggtttccaatgcacggtcgattgcctgttccgggtcgatcgtttcttcaatgcgttcacgaccaacctgggcaagccagagtttgaacggttcagctttaggtgacggaattgactgaataatgcgtaaaagctgttcagccgttgccgctagcaccttacgctttttgcctgttgcgcccatcattgctacctggggacaatttgtccccaggtagcttgcaagctgttcgtcacgcttacgcatttttttgagatagtctgttggattggaactatctgtcaggacagcgataacatccacaacggagaaataccattcttcctgttcttcgtcccatgcggtgcgtatttttctatcttcaaaaagctggatggaattattttcgtccatgcgcttcaacctccttagagtatgtattttaattttaacatgaaagggtttctatttctataagagaagcaaatttcgccgtagtaggcgttgtgggaatgtgcgtaaactgccaggattgtgaggctgtgggaaagctgtttgcagacctgtgggaaaaggcttgtctttttccatcaggctgtgaatggcttttccatcggcacgagcggcagttttccatatttccatgacgcaagaaaatcatccaacgatcagccagtacaccgtcagcggcacataccacactgccacgatcagccgccatgtcagaacgaaaccaccgatcacaccgccgataataaagttcagtgcaaacagggcgatccctccacccagggagccgccgcccggcacgatccagaggcacatccgatggagtccaaacggcagcccacagagtatccagagccatacatagtcaagctctccgttcttcacgcaggcagatttgaagatacaatacaggatcagtgccatggtcacgggcaatacgcttttgaagaaaaatgctttgattgcttcgcttcttgtcatcggtaaaacctccttccgcagttccattatacaggatgccgggagctgcgcccagcgtctttcaaagaaatttattccagttcatgccgccgctgttgttcctggtcctttggaacggccagcagcgcatccacattctgcttgacggtatcgtattcctgtgtttcggttcttgcggttttgaactccgtaaggagccgttccttttctgcgttgagattagcaagctccgttttcatgctttcagttgtcggcagcggcacagcccccagccgtttcaattctctggcggccgcttcaaaaaggatgatttcgctctcatgcccccgcagaaacttttccttatcgccggatttacggtaacggtcgtagatcggtttcaactggcgataggtggtagcgtgcttcatcacaagggtaagttcggcacttctgctttctattcgcttgatctccgtatgagtggtatccctgcgctcagacacggcggccaacttgctttccagttctccatagctgcttatcccgtgttcggtcaggaaattcatggtcttggcggcttgtttcagattgttcaacttcgcccaatgggtgaagcctgcgctctgctgtgccttaatgttattctggatatcaatgagcaggctgatcttcccgttctgctgtttcagctggcgggaaggtctggagcgtccagcaatccgggcggcaagggcttcttcggtgtaatccacaccaagggttttcagacgggtgaaccgttcctgatccggtgctttggcggagatatacttgccgcgcttaatctcataaccttctctctgcaggcggcgaagcagttcttctaaatcggaacaggctggtaggagccggtcgatggccgcttttagcttcgccttatagctgatgccgttctgtgtggcctgatgttcaatatagctcttgcccttgtcctgtccgggaatgatgacggacaagccgtgttccttgcaaagccggtcggaggtgcggcggatatcgtgatagcttcgcttgttggaatgatagtgcttgtaatccacaaagctgaccgcattaaaaatcaggtggttatgaacatgatctttgtctatgtgggtggtaaggacaaactcatacttgccgcccaggatttcttttgcaagctccatgccgatttcatgggcctgctccggcgtgacttccccaggctgaaaggcttggatcagatggcggcccaggttcgttcccttgtcgatggcatggcgacgggtccaggaaaattcgatatccgcagtttcggcagtgcagccataggaggatacaagcagctttccgtccgtcttttccgggttgcagatatagtcaatggctgctttcagcgttgacttgataggatgtgtctttgtaactgccatatctcgtccagcctttctcgtatctcgtccatatcggcctgatacgcagggcctccggcattgatccgcttggcaatctgattgatgttccggccaatggcagcaagctctttggtgaacgccttgatatctgcggtgtccgtatagatgatatatccgtcaatcgccatcttgcggaggtaggcaccatatctgcgtgtgggtagctggctcattttctcgtctatgagccgtttttcgtcctccgtaacatagaatttcatttggatattccgctttcggtttgccatgcgccgcctccgttcttcataagggtttgggattatcccaacaagcaattttgaattttcgggtaagggacctgaaaatctcaaaattcgcaagcgggtactcgcttgctgtgcttgctactgtaaccctaccctcattctccctctactaatactacaatttgaaacggagattttggctattttcatctaaaaatctttaatagcatgggcgttcatcaaaatttgacacaggagaaattatcacatatacttaatggtaattagttataatgagccaaaaggaggcattggtggtgctgacctatgaaaaacaagcactctctggtacgattgaagtattattgcggtctgaattgccagacgaatttgaagggacaaagttatacggctctctcgaagaagatgaactacggcaggactgtaaaatttttcggctgtcaaatgaaacagggcatggacgcattacagtctatcaggttttttctggtattgagctttactataacgatatgcacatgggatattgcaatcaaaatcaagccacagctaaaaacatgatagagattaaccattgtctgataggacgttttgagtgtagctttggtgaaaatagttgctgctatatggcggaaggcgatttgtcgatcagctccatgatgaagaaaaagtcaaattcgtgttttccactgaaccactatcacggtatttctatcgtcatcaatctggatgaattgctgccggaaatacggcaaatcatggagctattgaatattgatttgcactacatacaaaaatatatttgcgaaggaaaccgttgctgcatcatgcgggccaatccgtctattgaacatattttttcggaactctatcatgtccgggaaaaaagaaaaccaggatacatgaaagtcaaaatgctggaactgcttctgttcttaagtgatctcaatacggcagaagaagttttacagacggattatttcaatcaaaatcaggtcgcattgattaaagcagtagcgtcctatattacggaggacttgacagcacatcatacgattgaacagctttcccagaaattcgagatttctacaacagcattgaaaaagtgctttcgaggcgtctatggaacctctgtctattcttatcttcgtacctatcggcttcaagtcgccaaaaaattgttgctggaaaccgagtcgtcagtaacggagattgcaagtaaaatcggatatgaaaatccgaataaattcacttctgccttcaaagaaacgtatggcagctctccaacggaattcagaaagagtgtccgtttggatagaagcgggtccgtatggagtggcgaagaaatctgagctgtattagaatatcctttgtcagataaaagcagaaagaccgcttgaagctggcctgttttttgaatagcgggttagacgttgctaactttctgcaagacaaaggaggatttccaaatggaaaatgaaaaatcgacaggtaacaagtacactgtcaaagacgcggcaatcatcggtatcttctgtgcggtcatgttcgttgtatttatggtctattcgatcctgaccggcgcttcactgttctattccatgatttttaacgccgctggtgcggcacttatcctcgcaccgttctatgtttatatgtgcatgaaagtcggcaagcatggccccgctcttgtctacaatatcatgtgggcgattatcgccggattgatgatggggccatttatgattccgtggtttttgggcggcggtatcatcgcagagctttccatgtgcggaaaggatgcctaccatgacattaagcgtgtgtctatttcgtgggtaatcacggcactggttcgcgctgcacatggtatgtcagaaatttggtttttcaaagacgcatttcttgccaccggcgtcagcgagcagcaggttcaggttcagacccagtattacaccgatccgaagtacgtccttttgagcctggctgtcaccgctatcctggccgtccttggctgcatgattagtaacaaactgattgtgaagcacttcagaaagagtggtgcgattaaataaactatgagcatgaaatttgattttcgaaccaaattgcttgtcatagttctcactatgtcgcttgtggcggtgctcacaagcgacattttgatatacacactttttggcgttttgagcgtgtatctgattattcagggctttggcaggcagacaataaaatatttgatcgtctgcggtatttttatcgtgttgaggttgctttcaggaggacagggcattaccattcttatgccggaaatgttcctgttcatggtgctgcgtattttgatgatggttatggctgcgcagcccgtgattggtatgccgccgggagaagttgtagcagtttttaagaaaatccacgcgcctaatggaattgccctgcccgtaaccttcatgctgcgtttcttccctactgtgcgcagtgaattttctgatgtgttttcctcccttcgactgcgaaagctgttgtcatggaaacaccctctggacgcaatggagtatattgttacgcctgttattttccgttcatccagaatagccgaagaacttgccgcttctgctgaaagcagggggatttccaatcctgggaaacatacctgccgcagaaaaatagaatttcaaaaaagagattggattatgtgcgtgattgctgtttgtgtaactgcattctattttgtgctggaaaggacggtagcataatggtaaatgataaagcaaggcgatccgttatccagtttaaagatgtatcttttgaatatccgggagccgaaacagatagtatccatcatatcagcctcgatgtaaaagagggcgagtttcttgttctgactggagggagcggctgcggaaagacaactttaacacgattggtaaacgggttaggcgaacaattttacgaagggacactgaaagggcgcatcacactgttgggacgcaacatatcggaatatcctctgtatgaaatcgggaaaaaagtaggttcaatctttcaagatccaaagagccagttttttgccagtattacagaggatgagatttcgtttgggtgtgaaaattatggcgttccgtatgaagaattggataggcgggtttcaagtgcaatcaagcgtattaacggagatatgctgcgagggaaagaaatttatccgatgtccagcggggaaaaacagaaaatagcggtggcatccgtcaatgctgttgatccggatatttatgtgtttgatgaaccttcggccaatttggatatgtattccgttgaggcgcttaaaaatttgatgggtggacttaaagcggaaggccacacaatcattgttgctgaacaccggctttattatcttactgaccttgcagaccgttttctctatatggaaaacgggagcataaaagaagaatggacggcgggagaactgcgctctattccagaagaaaaaagacgagccataggaatacgagcggcagatttgcaccatattgaagtagatatttcccctgtaaaagaaaaagatatgacgatggaggtaaaggatttggcgttttcctatcgcaaacatccggttttccatgatgtatcttttcaggcgtatgctggtgatctgattgcgattgtaggccataacggaataggaaaaactactttgtcgaatattctttgtggtatgcaaaaggaaaaagagggtcaggtcatatataacgggacaaaggtatctaaaggcaaacggaagaattttgcctactttgttatgcaaaatacagattgccagttgtttggggacagcgtagaagaagaactgctattaaacggaaaaggcagtacccaggagcaacgcgatgatctgctaaaactatatggcttgtttgaatggaaagaacggcatcccgctactctttccggcgggcagaaacaacgactcactctcgcagtatcggattggatagatacccccgttttgattttggatgagcctaccagcggtcttgatttcaaaaatatgatgagaatatcggagcatttgaaagctctggcgcaaaaaggaaagaccattttaatcattacccacgattatgaatttgccgctatgacttgcaatcgggttctgcatttcgttgatgaaggtcatgtagaaacatttccgttacaggaaaatttgtcccgcttatactcctgccttatgtgtcaatgaattatgtgtccgattggatagatacgctctgtatggagtggcaaaaacaaccgaatgattttatgataatagacgggttataaaatgctaacccgtctattattgcgaaaggagacttgcttatggagaagcaaaaaaatggagaactgtccagaatgttcggatatgcagggaaattccatgttttgactgttttgggatgtgttctctccggaatcagtaccattttatctatgctgccttttgtttgcatttggctcgtcatccgcgatttaatccaggcttttgctgccggggatatatctcttgcaacggggagcgcccattatgcgtggatggcggttgtgtttgcagcggcaagcattttaatttattttatcgccctgaactgtactcatctggcggcgtttcgtacagccaccaatatgagaaaatctgcaattcatcatatcgtgacgctgccgttggggtatttcagccaaaatgcaagcggacggctcagaaacatcattgatgataatgcagggcttacagaaggatttctggcccatcagcttcccgatctgaccggagccgcagttatgccggttgccgttattattttgattttcctttttgactggcggctgggaatttgctgcctgatacctatgggaatcagtgtcatctttctcaaacagatgatgggtggagataatgcgcagtttatgggcaagtatatgactgcactggaaacaatgaataaagaagctgtggaatatattcgcggtattcctgttgtaaaagtatttcagcaaactatttattccttcaaaaactttcacgctgcaatagaagaatacgaaaaatttgcttccgggtatgccttaaaatgccgtattcctcttacgggatttacagtaacactgaacggcacatttgtttttcttattccagtcgccatgtttattttgtccggggtcagcggccaggcggcttatgaaaatgttgtgctggattttctgttttacagtttgtttactccggtctgtgcaactatgatgaaccgtatcatgtttgccagcgagcagcttatggcggctaaaagtgcagtcagccgggtggatgaaattttgcaggaaaagcccttgaaggagccggaacatcccctgatcccggcagatgcttcgattgtgttttcggatgtttccttcgcctatccaggggccaaagagaaggccttagaccatatcagctttgaggttccgacaggaaaaacagtggcgcttgttggtgcctccggcagcggtaaaagtacagcggcaagcctcattccccgattttatgatgttcagtcaggttccgttacgattggcggcgtgaatgtacgcaatattgagaagcaggaactgatgaaaagagttgctttcgtgtttcagaatacctgtctgttcaaggacaccttgatgaataatattaaggcggcccgcccggacgctaccagggaagaagtcttgagagcggctgatgaagcacaatgcaaagatattattgaccgcctcccggatgggcttgatacgctcgttggaacaggaggcacatatctctcaggaggtgaaaatcaaaggattgctcttgcaagggcaattttaaaagacgcccctattattgtactggatgaagccacagcatttgcagatgccgaaaatgaacatcagatacagctcgcttttgagcggctgacccaaaacaaaacggttatgatgattgcccaccggctctctacgatacaagacgcagaccttatcctggtgttcaaggaggggcagattgcagaaagaggtacgcatgaagaattggtagccttaaatggtatttattcttctatgtggaaggattaccagacctcgattgcctggaaggtcggaaaggaggatgagcagcatgattaaggcgttaaaaaagaagtatgcgttaagcgatcagggtgcaaaagacctgttaaaagggatcgtttattcggtgctggccaatatcagccttatgtttcctgttattcttctggctatcgtcctcaatcagcttcttgcgcctgttttgggagcgagtgcgccagagatcagtgccgccgtttacactgtgattggaattgtgattttagctgttgtttttatttttcattattgccagtacaccgcgacatatctcgggacgtatgatgaaagcgcaaggcggcgtatcgggcttgcggaaaaattgcgtacccttccgctgaccttcttccaccagcgtgatcttgctgacctgacaagcacaattatgggcgactgtgcaaactttgaacacgcattttctcatacggttccacaattctttggagcagttatctctacggggattgtttgtatcggcctgctgattttcaactggcaaatgggtttggctcttctttgggtagctccgatttcatttgcaatcgttattctgtcacggaaatggcaggaaaaactcagcaaaaagcacatgaacgcaagactggagcttgcagaaggcattcaggaatgtttggaaaccgtacaggatataaaggcttgcaatcaggaagaagattatcttcgcaaattggacgcaaagatggatgctgcggaaaaagcacagatttcatccgaaatgacaacggcaagtctgctgacaaccggccagatgtttttacggctcggtttggcaacggtgattgtagtaggtaatagtcttgtggtaagtggagatacctctctgtttacctatattctgtttttgattgctgcctcccgcctgtacgatccgctttccggggcgatgtcaaatatggcagagctgttttctgtacagcttcaggtgaaccgcttgaaagaaatagaggaatacccggaagaaaccggtgagaagaatatccatacaaacgggtacgatattacattcgatcatgtccagttttcttacgaaaagggcaaaccggtactgagggatgtttcgtttactgcaaaacagggacaggtcactgcattggttggcccgtccggcggcggcaaaagtacagtcgcaaaactggcagccaaattttatcctctggacggaggaagaatactgttgggcggaaccgatattgctccgctaaattcaaccatgttgatgaaaaacttctctatcgtttttcaagatgttgtgctgtttaataacaccatcatggaaaatattcgtgtcggtaaaaaggacgcaacggatgaagaagtgattgccgcagctaaagcagcgcagtgtgatgaatttatttcaaaattgtcggacggctatcagacggtgatcggagaaaatggttcaacactatctggcggtgagtgccagcgcctttctatcgcacgtgctcttttgaaagacgctcctgttattcttctggatgaagctactgcttctcttgatgtagataacgaaactgaaattcaaaacgcaatatccaggctggtaaaaggcaagacagttcttataatcgctcacagaatgaggacggtggaagctgccgataacatcgttgtattgtcagatggtattgtagccgaaaacggaactcacgaagaacttatgaaagaaaatggcctctatcataggctggtcgatttgcagacagcttctgcaaattggaagttaagcgtttaatcataaaaggaggtactgatgaaacttcatgcgtccggggaggactacctggaggccatacttgttctccataagaagatgggcatggtgcgctccgtggatgtcgcccggcacctggaggtcacaaagcccagcgtgtgccatgcggtggcgaccctgcgggacgggggcttcctgacgatggacagcgactattttctgcacctaaccgacgtggggcgggaagtggcggagcagatctacgaaaagcaccgcttctttaccgaccggctgattgaggccggcgcagacccggaaacggcggaacgggacgcctgccggatggagcatgtcatcagccaggagtccttcgagcatctgaaaaatgcttacaaaacaaaagaataataaactgcccgcatagcaaacgggtgaaacagtaacgcggccgggcacatcgaacccgaccgcgttactcgtctttctgaaaggcttccgcctgtttgcagagcgcgataaatttttcgatctctgcttcgcttttcccggcaaaaaagtccacaactgttttcgagactgtctgatttaccatttccgggaagatggcggcgtccacgctgatattcagttctttggcgacaaggaccaccgtttcaaatttcggattactctggcaggtctccaaatctatgattgtgcgggggttcataccgaggcgttcagctaactgcttctgcgtcagatgctggcgcttccgttctgaccgcaccttccatgcaaatagatccagcggattgttcactacacatcacctctacatcattgtagggtgtgcttccgctcatataaataaccatacagctcatgcaaagtgaattataactcatatttcggagtaaagggggatatggatgagagcgccaacacaaaggaggtcaaaataaggcggggtttaccgtttgtacggcggacgcccatgccactacgaaaaatattccaataacgcagcagcgagccatgctcatgaaagtgagttatggctcgctttttatatactgtggctcgtatctcacaaaacccgtttctttgagcgcctgggcgtgggctgccgctccccgccccgtttcgctctgacccactggcctgaacgaaacgaaaggagcttatctatgagcggcaagaaaattacatataatccccccgcaacgaagccaaaacggcctatcgctgaacgagtagtgagcgaaaggggaagaaaagaactgcctcccggcacgaagggaggtgagaacttgaaacctgaccgccactacgagcacaagcagcacgcctttgacagctactacaagaaggtgctgaaatacgaggcgtacaatggctatcgtgagatcagccgccgccagaagtgtgaggcattgttcagcgaactgtcggaggagaaattggcccagcttgcggtttatgaccgctactcctgggaatacacggccttccccgtgggaggcgctgtgatcctgattgaggatgaccggctggccgaggcgctgaacgccctgccccagaataaccgggacatcttcctgatgtactggttcctggacatggcagaccgcgagatcgccgagtacatgaacatggcccgccggacggtcaacacccgcaggcagaaagcctatcggctgctgaaggagctgatgggaggtgaagcggatgattaaatctgcgtgcacgcgggcgtcgctgatcccttatccggtgatcgccgccgctgtcgggggcaaccccgaagcggtgaaccgggtagtccggcactattccggctatatcgccgcgctgtctacgaggacaagctatgaccttgacggttttcctcgtccccaggtagatgaagatttgcgccggcggctggaaacgaagctgattatctccatcctgggctttgatctgaactgacccagggccgggcgctgcgtgttttccccctttccacgcggcgcccctatatagcaccttgacaaagaaagcccgttgggaggccaacgccgcagtataaggcaaacggatacattcctgtttgtgccgagccatacggccggtgcgccatgacctcgtttcaagtccgcaggacgggaccactgtaacgggcgagcgaacagcaccaggttgcaaagcaagcgtggcggcttgcaggcgatgacacacgggcagggttaaagatactcgcgcattgaacgcccacaaagcattgtgcgccgcacccatcagcatgggccggggttagactcccgtggagctgtgccagcagccgtccgtaagcctacttttcttttttgaaagtttatggatagatcgtaaacttttcaattagcagcagacaaacacggagcagcacggtaaaataatggtggaagttatattacccacacatattcgtgctgttccttttcataactgaaagggggttctcatgtctcaaacatggaacggcacgaagaaagaaacccctgaaagaaggacgtatacggttgacgatattgctcaaattctgggcatcggaagaacttctgcatatatccttgtaaaagaagggcacttcaaaatcgtgcgaattggtaacgccatacgcatttccaagcggtcatttgacgagtggcttgactccctcgacctgtgatccaagaaaggaagaacgatatggcatctataatcaagcgaaagaaaaactattccgttgtttacaactatgtggacgaaaacggagaaaccaaacagaagtgggaaacctggcatacccacaaagaggccttgaagcgcaaggcagaaatcgaaaatcagcagcacacgggaactttcctccctccaagcaatcagacgatcaccgagttcctttatgacttcgtatctctttacggagaaaagaaatggggcgtgtctatgtatgacagccaaacggcgctgattgcgaactatatcaatccgatcatcggtgatatggaggtacaggcggttactccccgtgcggttgacggttatatccagaccttgcagaaaaccaagtcggtgtctaccaaaacccgaaaggccgttaccacctatgtcagcgacaagaccattgaaaagatcatcaagctcctgcggtgtgcgtttaagcaggcggtacgatgggaaatcattgcaagaaatccctttgacaatgtgatcctcccgaaaacggagtatgcgaaacgggatatctggacggcggatatgatccgtcttgctctggacaaatgcacagacagcaaactctatgtagcaatgaacctttcctttgcctgctctctgcgtatgggtgaaatcctggggctgacctgggaaaacgtccatatctccgatgaagatattgcggcggataacgcctatgtctacatcgacaaggagctgacacgggcatccaaacgggcaatcgaaacgctgggtgagaaggatatctattacatcttcactccgctcatgccgaacaccagcacaagaattattctgaaaaagccgaaaaccgattccagcatccgtaaggtgtggctaccgaaaacgctggcctacattctgcgggaatggaagaagtcccaggacgagttgaaaggtttcctgggcgacgagtatcaggacttcgatctggttgtggcacttcccaatggccgcccctgcgaggatcgtatcatcctcaaagagtttgcaaagctccgtgaggacgcagggctgccgaaggtggtctttcattctctccgtcattccagtaccacctacaaactgaaactgaaccacggcgatctgaaagctacccagggcgatacaggccatgccgagatcgacatgataaccagtatctatgctcacattctggacgaggacagaaaggtcaatgctcagaaattcgagacagccttctatgccaaacctgatcttcgcaatgtccgtccaccggaagaaccggtaaaatcggagcctgcgaccctggaccttgaaagtcttgtggagcagcttcagaagtcgccggagctggcaagtgcgctcgcagccctgatagcggcgcaagccccggcaaagtgatccgaaaaatcgaattagcaaaacgcagaattttcttagcaaatttctgaaaagcgttcgagtccaattagcaaatatacatcatgcggcgcataaaaatctcccgataacggaagtgaaattaccgggagaaggaggaacaaaaaaaacgctgcaaaccccgaaaaaggcttgcagcggtgctttctggcgtcccagagaggatttgaacctccgaccccacgcttaggaggcgtgtgctctatccagctgagctactgagacatttataagttttatgcaattttcaaggctcaaaggaatcgaaccatctgccgcttaggaggcgtgtgctctatccagctgagctactgagacatttttaagatttatgcaatttttactgctcgaaggaatcgaaccatctgccgcttaggaggcggaccctctatcctgctgaggtacaagcgcatatttaatttatgaggcaattacccatctattggggaacacttttaggttctcttaggagcgtgacctctatccaactgagttgctgagacgtgttaaattggggtcataaagtgtactgtgttattgtaccgcacggcggcgcatttgtcaatcatattggattttcgcgcactgaaatatacacagaaaaagctttgaaaccccatgcaaattttccgcaaaaggtaaggctctgggtggcttttgccttgacgcttttcgctttttcgtctatactgatatatgtatgaaaacttatggaaaccaaacaccgcgggcatcgggaaatgtgcctgcacggaaaaaacaaaggattaaggagcccgatacatggtttttgccgatttgttctttatctatgtctttttgccactgtgcctcatctgttacggcctcgccaaaaagctcagcaccaaaaacatcgtgctgattgtcttttcactcatcttttacgcttggggcgagccgctttggattttgcttttgctgttcagttcattctttaactggttcatcggcatattgatcggcaaatttcgggataccccgcgcgcaaagttagccgttggcggcggtattttggtagatattctgcttttgctcatctttaagtacagcgcgttcattgtagaaaacctgaacgctgtttcgggcgcggccattcccgtgccgcagatcacgctgcccatcggtatcagcttctacacgtttcaggctatctcctacattttggactgctactgggaaacggtagacgtgcagccgaaataccacaaatttcttttgtacctgtccctcttcccgcagctcatcgccggcccgatcgtgcggtacagcgttgtggagcaggagatcgacaaccgctccgtcaacgcgaccgacctatgcgaaggtgcgctgcgcgtgattctcggccttgcgaaaaaggtcatcatcgcgaacaatttgtggtccatcgtcaacacgttctttggcaaggacatcacgggactttccgtgctcggcacatggtacaccatcatcgtgtattcgctgtatgtttactttgacttcagcggttattccgatattgccatcggcctcggccgcatgtttggcttccgctttgacgaaaacttccgccatccgttcgcctgcaccaccattgcggagttctggcagcgctggcacatctccctcggctccttcttccgcgactaccttttgtacgtgccgtttttcggcaagccgcgcaagtatttcggcctgttccttgtttggttctgcaccggtctttggcacggtgccgcatggaacttcattttatggggcctttactacggctgcttcatgctgttcgagcagaaaatgggcaaaaagcgcatgaaaaaatggccgatcgtgtggaagcatgtgtatacgaagcttgtcatcatcctcggcttcggcatcttctattttgaagatctcggccagcttagtcagtttttcctcaatatcacgggcatcagcatgattgcgaacagcgcgccgtttacggaccccatgacgttctcctccctgcgcaacaatatctttctcattttgttcgcgattctcgtcagcctgccggtattgccgaagatcaagagttattttctcgagagcaaaaacgataccgtttataccatcggccgcgtcggctccgttgcggtctgtatggtgttgctcgccgtcgtgagtgttctgctcgttgataccacgaacaacgtgttcctgtatttcagattctaaggggaggtgctcattgacatgaacgattttaaagaccttgaccttgattattttgctccccgcaagcccgccgaaccggaagcgaagccggagaaaaccgaagtcggagatgcgccgactgcggatgaaagcgccgaacccgcagagcgccgccgcaagccgaaaccgagccgccgcgagcttttgaacatgcggctttccgttttatccgtcggcgttatggtcattcttttcgccctgatgacgctgtatctgctccttttcccgcgctccaccgtctcacagattgaaaaccgaaaccttgcggaattcccgaaattctcttttgcatcgtatttttccggctcgtttacggcggacgtcgccacatggtttgacgataccgtgccgaaccacgacggctttaagaatatgagcaactccattaagaacctgtttggtatgaagatgttcgcttcaacggtcagcaccgcaaagcccgagacggacagcacagataacaccgatacttctgccgcaaacggtgacacccagacgaccacacccgcaaacggcaccgtgccaaacaatacgaatctgctgcaatacgccgcagggcgtgtgttcccggccgtgagcgctgcggatgaaaaaatgggccgcgatttcagcaccgaggataacagcacactggaatgggtgaacaacctgcttgttgtaaactgggataatcactggcgctgcatggaggccttcggcggcggtggcggcaccgcttacgccgatgcactcaacgacctgcaaagcaaggtcggcagcggtgtgaccatttggtctatgcccgcacccaccgcttccgccatctacaccccgaaaaacggcattgattatgttggcgaccagaaagaatgctttgacggcgttgccgaaaagctgaatgccggcattcagtccgtaaacgttgtggacgtaatgaaaaagcatgcggaagaagatatttacctgcgcaccgaccaccactggcaggcacgcggcgcttactatgccgcccgcacgtttgccgaggccgcaggcgtgccgttcgcagacctttccacctacacggaggaatccattccgggctatgtgggcaccatgtacggcttctcgcaggatacgcgtattttaaacgacccggacgacttccactacttcgtgccggcctcaaactacgtggcttcctactacgatacttcttttaactaccagtacgaagacgacctctttgccgatgtggacaccgcaaacgcgtacctgaagttcctcggcggcgactcctgcatcgtaaaagtcgatacgcagatgaagaacggccgcaagctgctcgtcattaaggacagcttcggtaacgcggagattccgttctacacgaattcctttgagcagatctacgttgccgacatgcgctatttggagtgcaacctcgtcaacttcatcaaagatatgggcatcacggatgtgctctttacgatgtccgcatactccgttgtgggcgataacgccgacaacattcagaacctcatcgcgcagaacgccggtgagaccatcaccgattcgcacattgtcccgtctgttacgccgaaaacggtcatgccgaccgcgacaagtgcaccaacgacgacttccggcacggatacggccgctaacaccacctcgaccggtacagatgatacctcttccgcaaaagaataacaaaggagagcctatgaaagaactggaatatccctttgacgccgcttatatcatcaaaaagcgcaaatctttaaagaaagcactgctcgcagacggcacttcgcgcatcagaaagaagattgccgtgttcggcggctccaccacaagcgacattgtaaaaacgctggagcttttcctcttagacgccggtattgagccggaattttacgaatccgaatacgcgcagtattttcaggacgccatgttcccggatgaaacgcttttaagcttcaagccggacattgtgttcatccacaccacgaatcgcaacgtgacggactggcccgagatgaccgacaccacggagcagatagacgaaaagctgcacacggaaataaaccgtttcacggcgatgtggaaaagcattgcggaaaagtttcactgccccatcattcaaaataactttgaaatgccgctttaccgcctgctcggcagccgcgacgcgtgggacatccacggccgcacgaatttcctcacgcgcttaaacgaagctttttacgcctacgcacgcgaaaatgagagcttttatattcacgacctcaactttgtttctgccgattacggcctgaaagaatggtcgaacccgctgttctggaacatgtacaaatacgccatgtgctttgaggcgatcccgtcctttgcgttcagtgtttcgcacattatcaagtcgattttcggcaagaataaaaaggcgcttgcccttgacctcgataacaccctgtggggcggcgttgtgggcgacgacggcgtagacggcatcgagatcggccaggagaccggcgtttcgcaatcctactacgagtttcagacatacgtaaagcagcttaaaagtctcggtatcgtgttgacggtctgctctaaaaatgaccatgaaaacgccattgcggggttaaaccaccccgaaggtgcactgcgcccggacgatttcgtcatcattaaggcaaattgggaaaacaaagaccgcaacattgccgagaccgccgcagagctgaacattctgccggattccatcgtttttgcggacgataaccccgccgagcgcgagatcgtgcgcacgcagatcaagggcgcggccgttccggacatggacggcgtggaaaactacatcacgacgattgaccgcagcggcttctttgaagtgacaaccttcagcgaagatgacttgaagcgcaacgaaatgtacaagaaaaacgccctgcgcgccgcggaaatggcgtcgttcggcgattataacgactatttaaagagccttgagatgcacgccgtcatcgatgatttcatcccggtgtaccttgcgcgcatcacacagcttacaaacaagagcaaccagttcaacgtgaccacccgccgctatacgcccgccgaaatggaaagcgtatttgaggacgacggctatatccgtctgtacggcaagctcatcgataaattcggagacaacggcgtcgtttccatcgtcatcggcagaaaaaacggcacggcactcgacattgacctatggctgatgagctgccgcgtgttaaagcgcgatatggaatttgccatgttggaccgccttgtggagcgctgccgcgaagtgggcgtagagacgattaacggctactactaccccaccgcaaaaaacaagatggtcagcgaccttttcggtcgcttcggcttcacgaagactgaggagcacgaggacggcagcaccgtgtggcagttgcgcgtcgcggactataagccgcagaaccacgtgatcgaagtgttcggcaacgaccacgcagaagcgtgatcctcgctaaattaagtattaaatcaaatcacagaaaggaattttaccatggacacaagagaaatttttgaaagactggaccgcgtatttcaggatgtttttgacgatgacaccattcacgtcacgccgaaaacgaccgcagacgacattgaggattgggacagtctggagcacatcacgctgatctccgctgtagagcgcgagttccgcatgaagttcaagatgggcgaaatctcctccatgaagaacgtcggcgaaatggcttccatcatcgcagcacgcgcaaagggctgatcttaccgcaaaagaaaatgccgcagacaaccgggttttcccgtgtctgcggcatttttatatttacggttatttataacggttcatgaagtcgaggtaatcgtcctccagcgtgcgcttcggttcttccttacgcggagcggtgtacgggtcagccgtttcctgctcggcggcacggcggcgctgttccgcacgtctgcggcgcgcttcgcggcgctttttgcgcacgcgctgcccgtggatgtacacgataagcagcaacaccgcaaagacaatgacaagcaccaaaacaaatttcaaaatgctgaaaatcaccgagccacccttagggccgctcgcttcggaggatgcactgctttcggccgcggaagattccgtaccgccggcggtggactctgcgctgcttgcagtgcccacagccgccgagtctgtggggttgccggatttatacgtttccgctgccgctgccacggcgttaaagagctttaaaacaccggcatcatatgcgccggtctgaaaatccgcttccagattatcgtgcagcaaagcgctcagctccgtgccggagaacgcgccgtgcaggccgtcaccggccaccgccatatagtcgccgtccgaaacagaaaggcctatgataagcccgtttttgctgtcgccgccaagcttccacgtgtccatgacctttttaaggtaggacacgcggccatcataatcggatttttcgccgggcaaagtgttcatggtgaacaccgcaatctgcacaccatacgtcgcattgaggtcagcgtttttatcgttgattaccgttttcgtactggcggaaatcacactcgcttcgtcatagacataaagatccgcgggctgctccggcacttcggcgtccgctgccgtcgcgcttacggtgctgcccgtgtcgcctccgtcttcggaagacgaggtgctcgtgtcgccgtttccggcttcatccgcaaacgcatacaggttgccggtggaaaacaccatcaaaaccacaaggcatatcgccgcaaagcgtcccatacccgctttatatagatttttcatccaatccctgcctttcggcagcccggctgtgcccggccgcgtaaaataataccgcacaaaacctgtttcgtagttttatgcggtatcggttctgttgtacctattttaagagaatttttcgctgctgtcaagtaaagccaagactttgcatcttacgatcctcttaaggttatttcagctctacaatcgtcacgccgctttcgccctcaccatatacgccgaggcgaaaggatttcacggccttgtggcggcgcaaatgctgctgaatgccgtttctcagtatacctgtacctttgccgtggataatcgtcagcatgttgagattgtgcatcaaagcgtggtcgataaacgcatccacttccatgagcgcttcttccaaattcatgccgcgcacatccacttcattgcgcgccggagcggaatccatcttcttcgtcacggtgcggtgaccgcctgcggctttcttcttttccttcggcttctggtcggtcaggcgcaggtttttcagcggcacgcgcgttttgatgatgcctacctgcaccaaaatctggtcgccgtttttcggcacatccaaaacggtcgcaatcttatcgatgtcgtaaatcagtaccgtatcgccgacctgtaaggggcgcggcaacacataatcttcgtctatgcggcgctcgtgcacagggtcgctggccttttccatatcgcggatgcctgccttcaggcgcgctttctgctctgcggtcaataatttctgcttgttgcggcgcaggtcttcgagctcgtctaacaggctctgggcttcgcggcgcgttttctgtacgagctccgccgcttccattctggcgcgctcaatttcgtgcttcgcgtccttttcggcgcggtcgcgcagcgcttcagcctctttttccatgttctgcgctttcaaacgcagctgctcggcactctcacgctcatcttccattttgcggcggctctcctccaaacgggagacgacctcctcaaacatagtgctttcatcggaaacgagttcctttgcgtgctctacgatattcgccggcataccgagacgtgcggaaatggcaaatgcgttggaatgacccggtacgccgatgagcaggcgatacgtcgggcgcagcgtcgccacgtcaaattcgcagcaggcgttttcaacgccaacggtttgaatggcatatgccttcagctctgcgtaatgcgttgtcgccatcacgcgcgtgcctttggtgcgcatggcttcgatgatggaaatagcaagcgcggcaccctcgaccgggtcggtgcccgcaccgagctcatcgataaggatgagactcttgtcgtccgcaatgttgagaatgcggatgatattcgtcatgtgcgccgagaacgtggagagagactgctcaatgctctgctcatcgccgatgtccgccaaaacgtggtcaaaaatcgaaacttcgctgccgtccgccgcggggatcatcaggccgcacatggtcatcagcgtcaaaaggcccgccgttttcagcgagacggtcttgccgccggtgttcgggccggtgacgatgagggcatcaaaatcactgccgaggtacagatcggtcggcacgactttatttttatcgatgagcgggtggcgcgccgatttgatggcgatgcgcccctcctgattgagcttcggcacggtcgccttcattttgtaggcgagctgcccttttgcgaaaatgagattcagctccaccgccgcgcggtagctctggatgatgccgtccgcaaactcgccgatctcacgggaaagctccgtcaagatgcggtcgatctcgtccttttcgtccgagcgcaacacgcggatttcgttgttcgcctccacaacgccgatcggctcaataaacacggtggcaccgctgccggaggaatcgtgaatgaggcccttgacttcattgcggaactccgccttaaccggcacaacgtagcggccgccgcgttgggtgacaatggcctcctgcaaatacttttggtaggtctgcgagcggatcattttatcaagctgctcgcgcacgcgcagcgatgccgcgcggatcttgcgacggatagccgccaaggcgacgcttgcggtatcggcaacttcttcctcgctgacgacggtcatcgagatgcgatcttcgataaacttgttcggctgcaaggtctcgaagcggtaatcgagcgccgttttgacgctttcgctttttttacgccaatccgaaacactgcggatggcacgcaatgtcgcggcaacagacaataattccgccagattcagcacgccgcccgcttctgcgcgacgcagcgcattcgtgacattcgtcatgccgtaaaacgacggtgcgccgtactttgccattaaaacaaacgcgtcgtccgtttcctgcaaaaggcgctccacgtggcggatgtcggtatccggctcaattttctgcgccagctccgccgcatccggacaagtggtttcatttgcaagctgaagcagaattttatccagctccagcgctttatgatctttcagcattttgttcctgctttcttttcgtacccggttttgccgggtcaatctcctctgttaatccaaaaacgttttataaaactccaaggtcttcggtacggtatgtaatgtatggacaacgtagctttccgttgcggcgttcagaattttcagcgcatcctccggcagcgagaagttatagagcttttcaaaatccacatacgcaatgtgtcgcatggcggtcagcacgcccggcggcagcgcaacatacggttcattcgcgccgtgaaagcacttgtcgcacagaataatgcccctttgcggcagaaagaacatcgtttccgcctcatacgcggcgcagttttcgcacgcaactaaatttggcatatagccagccgacgagagcatacgcagctctgtcacggactgcaacagccgtatcggccgcgtgccctttgataaaaaatgcagggaatttaagatgagccgcaggtattcctcggaatccgtatcctccggcaccattaagtacgccagctcacagaaatactgcgccagcgaaagcgcggcgatgtcccgccgaatcccgaaaaagacctcgatcggctcggcatcgtcaatcatgtatttttcccgccccttaaaaatagaaaggcgggaatagcacaaaagctgcgttgcggcgcttttgctgtcctttaagtttttggcgcggcgggcaaacgcacgcaccacgcccgcgtcacgcgtcagcaccgtgacaaggcggtcgctctcgcccaccgtctgctcccgaatgatgagtccctgggtctttacctgcatcaaagtctcctgccgtaaaatccacgtcggcaagctcccggcgtgtaagctgcacgtagcggatgtaatcctccgccttgccgcttttataaaagctgttccacgcggcatacgccgcattctgcatcggggaatttcgcatacaaacgcctcctaaaccgtatggctgtttttagcttctgcggtttttgcgggttttatccgtggaaacgtctgtcaatttctcaaaatgtgaccgttttcccgaaaatcgcggtttattggtactggtcaaaatcgtgttcgttaaagccgagctttgtgaggatctgcgggcgctggcgccagtcctccttcacctttacccaaaggcgcaggttgatcttgcagccgaaaaagcgctccatgtcttctctcgccttcgagccgatttttttcagcattgcgccgcccttgccgataatgatgcccttgtgcgtggcgcgttcgcaatagattgtcgcatcgatctccgtcaggttgccgaggtcgcgcatgctttccgtcacgactgcgacgccgtgcggaatctctttatccgtaaagcgcagaattttctcgcgcacgatttcggacgcaatgacgcgctccggctggtctgtgagtgtatcttccgagaagaagtgtccgcccggctccgccagtgcgatgagctcctcacgcagcgcgtccatgccgttgccgtcctgcgcggagaccggcaccacagcttcaaagtcgtagagcgcggagagcttcgcaatctgctccatcaaaacgcttttgtcctgcaaaaggtcaatcttattgatggcgagcagcgccggcacacccaaatctttaaagcggtgcacaagctcttcatctgctttggagattttcgtatttgcctccacgacgagcaggcaggcgtccacatctgcgacggacgaggtaacgcttttcaccatgtaatcgccgagggagttcttcggcttgatgaggcccggcgtatcgatgaacaccagctgcgtttcgccctctgtccacacgcccataatgcgcgtgcgggtggtctgcggcttattggaaacgatggcaagcttcgtaccgagcaggcggttcaaaatagaggatttgcccacgttcggtctgcccacaatggcgataaacgccgatttttcgttcatgtagttttctgtatccatagttttcccggggcacgcagccacggtttcctttctgataatttatatctatatcactttttatgaagcttttcccgcacgccgcatggccctttgaaaatgaagaaaaaggccaaaatgagcgacagaatggaaagcacaaggtaaagcggatttgtgacgattgttatcaaaagcgctaagatcgcttccggccgccacaaaacggctataccgacaaaagcggcaaaaacggcgcacacaagcaccgctcccgccgcgatatcttttgttttgccgatgagcggattatagcttttctgcgcgtaatcacacagcatctcaatggcggtgttgaacgcttccgccgcgataaccatcgcgatggtcaaaagcagaacgccgtattcgctgcgcgttacgcccagaaagggcgaaaaaaacaaaacgtataccgccgctgtaaggtgtatacgcatgtttcgctccgttttcacggtatggaaaaatccgcgcgcggcatcgcgaaagctgtccgcctgcgtgcgggtcttaccgtttgttttccaatccggcaccatgttaaacggtgtagctggaagtgcccggcaggccgagctgcgacataacgtattcttctttttcacgcatgcgcacgcgctccatgccgccgttttcgtggtcatagccgagcaggtgcagcatagaatgcgccgtcaggtagccgatttcgcgctctaagctgtggccgtagcgctttgcctgcgccattgccatttccacagagagtacaatgtcgccgagaatcttcgcgccggtatcgtggttgatgtcatacacgccgttctcacccatggggaaagagagcacgtctgttgcggcatctttgttgcggtactgcgcgtttagctcgcggatctgctcgttgtccacgaatgtcacgctgatttcagcggaatcctcaaacttctccatccgcagaaccgcgtggcaacagcgacggatgagcatgcgcacgccggtcggcactttgaccgctttctggttgtttgtgatgatgactctgattttttccatatgctaaaatcctttcgataggggttattttgcggcggacgctttttcatacgcccgaatgatatcctgcaccaagcgatggcgcacaacgtctttttcggtaaaacggaaaacggaaatgtcatccacattgcgcagcacacgcatcgcgtccttcaggcccgagcgtctgccgtccggcagatcaatctgcgtgatgtcgcctgtgatgaccattttggagttgaagccgagacgcgtcaggaacattttcatctgctcgcaggtggtgttctgcgcctcatccagaatgataaagctgtcgtcgagcgttctgccgcgcatgtacgcaagcggcgccacctcaatgctgccgcgctccacaaggcgggcgtacgattccgcgccgagcatgtcgaacagcgcatcgtaaagcgggcgcaggtaggggtctaccttctgttgcaaatcaccgggcagaaaacccagcttctcgccggcttccacggcggggcgcgtcaagatgatgcggttcacctgctgcgcacggaacgccgtcacagccatggcgaccgcaaggtacgttttaccggtgcccgcagggccgacgccgatggtgatggtgttattgcgaatattgtcgcaataattcttctgtcccaccgttttgggctttacgggcttgcctttcgccgtgatgcagatgcagccgtccgtaagcggcgccatctgtgcttcgctgtcctccataaccatgtcgatgcagtagccgacgttctggtcgtttaggacttcgcctttttcgacgagccgcaaaaggctttctgccgcacgcaccgcacgcgaaacaccgggttcttcgccgatgacgtggatctgcgaatcgcggcaggaaaacgttacaccgaatgccttttccagtcgctttgcgttcacgtcaaagctgccgaaaagctctgccgcgtattctgctttgtctacatgaatgcttctttccaaatcgttctccttttgccgcacggctttaaaaaaccgtgcagtctaaaaaaccgaatttcctgttttattatagcataagtgttcccaatgtggttatgaaattttcaacgaaatttagccgtttccctgtacatttccgacaaatacccctataatctccgaattttcaggctcttcaggcagggtgagcggcgcctcctgcgcaatgttttcgagacatacgcaccgggacgtgacgtaaaccgcgccgttttttgtctgatatgtgatgttttccgtaagcacacgcccgtcttctccaagcgcaagcttttgcagctgatgcagattttcaagcgcgcggcgctgcgcttcttcctccgtgaacgtaacgggcacggtttcctcctcatatacgcgcaccgtttccacccacagcggcaacgtgtgcccctgcaaaacgaacggcgtgcgggtgtatgccgtctggcctttcggcgcgccggaaagcgagagcggcacgcgcacgcccaaaatatacagcgcgcgctgtgtaccgaggtccgtttcacgcaccgttccggtactaagcggacaggatgccgtgaatgtgcgctgtgtctccgccagaatttccgcacgggcgcgggtgtaaaaacagcgcacggggttgtattccgggtcatacgggtcgcccacctgtgtgatgccggaaacaagcacctgccccgcggcgcaggcagaaccgactttcacgagcaccgtgccgttttgcgccgtgattgaatggatgagccccgcgcgtgacgcgacgatgtcccccgtgccgtcgtgctccgcgccctccgcctttgtgacggacgtgcgcagctcaagctgtacggtgcacccctccgtgttgaacgatgcccacgaaagctccggcagctcctccaaaagcgcgacagaggccaaagcggtatcggtgcttcgcggcgcgccgatatacacgccaacgcgctttgctgccgctaaaatttcgctttcggcatacggaatatcttcaccggagatcgtcatctcccagtaaaagccggaaaggaacagcatcagcgccacgccgagcgccgtgccaagcaaaagtcccggtcggcgcagcatgcggcggaaccgaaacgggaagccgcttttctccgcaagcttcacccgcgcgtgcgtgcgttgtttgatcttatgcagctttttgtagtccttcgcatacaaggtgaaaagcacgtctttcccatccttttgaagtcgaatggggcgcagacccgttttcaccgcaatgtttataaaccgtgccgtatcgcccgaaacacgcgccgttgccgtgccgagcacccaatgcgtgattttcttcatgcgaacctcaccgcctcaatatgtcccgtgatcaccgcgccgtcctcttcaagacacaaaagccgtaagcttttcccctcaacccacacggcgcgccgcccgcagcgcaggccgatcttttccgtttcgtattcgattacgccgtcacaaccctctaaaataagcttcgccgtgccgagaatctccgtgcggatcgtgccgtcctgcatggcatagcgcagcttatctgcaagctcacccatgcacccaccctctttctttttactcctctatacgtatgtgcggaaaaacacgcatatactttttcaaaaggagggttcaccgtgtcgaagcatacagaacacatcgcttttttcattcgccaaaaattgcagcttccggcgctttatatccgcgccgccgcgcttttactgctcgccttgctcctgctcaggcaccgcaccgctgccgccgcaggcgttgtcagcggcatccacacatgcctcggcacgctgattccctcgctgttcccgtttattttactcgcgtgcctatgcacgaacagccgcgcggcgcaggtgctgtttcgcccgctttcccccgtaatgcgtcatgtgttccgcctacccgcctgcgccgctcccgccgttttgttggggctcaccgcaggctaccctaccggcgcgaagatcaccgcaaatttatacgcgaccggaaagctcacaagggaacaggcggcgcggctgttatgcttctgtaccgcgccgggctatgcgtttgcggcagcctatacgggcagtttattattaagaagcgagcgcatcgggctgaatttattttttgcctgcgcacttgcgccgttacttctgggactcaccctgtcgcgctttgccgaaaaacccgaaaaaagcctaaaatcgccagaatctgctcccggcggcatcgtctccgctgtgcaggacggcattaaggccaccgtttccctttgcgggttcgtcattgtgttttccatgcttttggccgttttgcacgatgccggcatttttcagtatttatgcggttttctctcccgctttgggctcaccgtgccgctttccggcgcattgctgacgatgggtctggagatcaccgccggagtcacacagtgcatatattggcacctgccggtttattttttagcgttcgggctcggcttttccggcgtttgcatccacttgcagatcttctcctttttccacaaagcggggctgccgctgtcgaaaacgagatatgttctcgcacgctttttaaacggtctgctttccgctgcattttatttgctgctttcctattttctcccggcaagcacctcggttgccgtggaaacctcgcccctcaacaccgcgcccatggcgggcagcgcggcatcatccttggcgctcatcgcgctgtctatgttctttcttctcacgtgtattctccgcagcggaaaaacaccgtcgaaaatttgtggtggaaattccaccgggaaaatgctacaatgagaacaactctaagagcaacctgaaaatcggaggcgacgaaagtgttcggacgcaaaaagaaaaaacaaacacccgctctgtttggcagccgcattgagccggactgcgcttactgcgcgtttcatgcggacggcgtacagaaaaaatgtcttgcggggcagctcggcggagagcactgcgcaaaatttcaatatgacccactgcgccgcgagccgaaaagcgaacaaaagctcgggcagtacagcgccgaggaattcaaactatgaaaacttatcttaaagcgtttcgtttaaagcgcttttggctgctgcttttgctgcctgcggcgttccttttggacttcgccgcacggcagagcgcagattttgccgagtggtatgccgtgacgatctaccccgtgtacgcgcagttcttttccgccattacgggagtcttcccgttttctgtcggcgaattttgtctgatcgcgcttgtccttttcattttagcgtatctcattcacggcgtttataaactcattcgtcataaagagggccgttttgcgtactttgtgcggtttttgtcggttcctgttctcatcgccacgtgcatcgcgtttttgtgcgtaacgaactacggcacgaaccaccgccggtacagctttgccgccgtcagcggacttaccgtgcgggagtcctccgccgaagagctttacaatgtgtgcgcgtatttaatcaacgaagcgaacacattgcgcgaaaacctgcccgaagacgaaaacggtgtatttcagctttcaaacgatgtttttctcgatgcagacgaagcaaaatcatcattcaacagccttcatgatacgtattccacgctctacacaaacggaaaaccgaagcccgtgctgttctcggaagtgatgtcgtaccttgacatcagcggcatttactgtccgttcacgtttgaagcgaacgtcaacgtccacatgaacgacgtattgatccccgtgacgatgtgccacgagctttcacacctttccggctacatgcgcgaggacgaagcgaatttcatcgcatttttggcgtgcctgcaaagtgacgacccggaattccgttacagcggtgtgtatttggcatccgtccacgcgatgaatgctttgctcactgtggacagcgacctgtggaaccaggcggacgctttaaaaagcgacgcactgcgccgcgacattcggtcaaataatgcgtactggaagcagtacgaaacgcccgtttccgaggtctccgaccgcgtgaacgacgcgtatttaaaagccaacgggcaggaaaacggtctgcgttcctacggcagaatggtcgatctgcttctcgcctactaccgcgacgagctgcaatagatatagtttttttgggggagttctctatgtgtgaaaaaatcattgcggcgtgtggaaacgactgcgcggtatgtccgcgctacaacgtgccgccgtacaccaaaaccgcagaagaactgcaccacaccgctgagctgtggtataaaatcggctaccgcgaccacgtggtgacaaacgaggagattgcctgtaccggctgcaaggaagaaaactggtgccgttatcgccttgtaaaatgcgtgaacgaaaagcatatcgcacattgcggccagtgtgaaaactacccgtgcgacgtcatgaaagcgtgcttcacggtgacaggctcgttcatctccacctgtaaaaaagtctgcacacccgaggatttcgagatattgcgcaaagcatttttcgagaaagaaaagaacctgacgcaaaattaagacgacaaaaggcctttgcaccgtccaaaacggagatgcaaaggcctttttatgtacgattatttattcgcgttcatctcgcggacttctcttaaaatgtcctcaaggtcatatttttcgggcgctttcggcgcagcaggctttgcctgcactgtctgtgcagccggcttcggggtatttgccgggcgctgctgcacgggcttcggcgcaggtgcggcgggctttgcagctctcggtgcggcgctttgccgtggcgcgcgattcactgaggtctgcaccgcagcgcggcgcacgttctgtggctgcatggagaccggcgtttctggcatgatggggcgttctgcggtgtactccgccgacaccggcatcgccggcagctcgccggtgtctttatccgggtcaaaggacgtgggcatgcggggctctgcctcacggcgcgcctgcatctgctcgcggcgcatgcgctcttcttcgcgtcttctgcggttgcgtcgttcctcctgctcaatctcatccagcacctcggcgcggtccgcttcgccgctgtcgcggttacggcttgcacgctgccacaaaatgatgctgacaattccgccgacgccgagcacgatgcacaccgcacccgcaatgaacagcgtgcggccgacgccgttatcggccttcagctcattaaagaacgattccgctccgctgctgtcttcgcctgcggtgtcggtcgtgccttccgtggtgtccaccgtttcggtgctgtctgtggtatcggccgtatcggcttcatccgcaaaggtaagcggcgcacacagcgcagcgccgagtaaaaccgccgctaaaacagcaaatatacgtttagaaaaagtatttctcataatccatttcctctttcgtgataacttttatgtgtcacgattttgaattcatttttatttagtttagcatattttgcatggtgtttcaacggcaaaataaacaaacccgccgcttctctgcacggttcatgcagtcgaaacggcgggtgctgtgtctatttatacttctttagaaatcgatcttctctgcaatgtacgcttcaagctcgtcaatcttcacacgctcctgctccatgctgtcacggtcgcggacggtaacgcagccgtcattttcactgtcaaagtcatacgtgatgcagaacggcgtgccgatctcatcctggcggcgatagcgcttgccgatggaacccgtatcgtcaaagtcaacagaaaacttctttgcgagcgcatcgtaaacctcgccggccttttcgctcagcttcttggagagcggcagaatcgctgccttaaacggtgccagtgccgggtgcagacgcagtacaacgcgcacgtccggtttttcttcggtgccgaggttttcttcgtcgtaagcgtcgcacaggaacgccagcgctacgcggtccgcgccgagagacggctcgacgacatacggcacgtagcgggtgttcgtctccgggtcgaaataggagaggtccttgccggaatgctcctgatggcgggtgaggtcatagtccgtgcggtctgcaatgccccaaagctcgccccagccgaacgggaacagatactcaatatccgtcgtcgccttggagtagaaggagagctccttctggctgtggtcgcgcaggcggatgttcgcttcgtccagaccgaggttcaaaagccagtttttgcagaaatccttccagtagtagaaccagtcgaggtccgtgcccggcttgcagaagaattcgcattccatctgctcaaactcgcgaatgcggaaaatgaagttgcccggggtaatctcatttctgaagctcttgcccacctgacaaacgccgaacggcaccttcttgcgcgtggtgcgctgaatgctcgggaagttgacaaaaatgccctgtgcagtctccgggcggaggtacagctggctctttgcgtcttccgtaacaccctggaacgtcttgaacatcaggttgaactggcggatatccgtaaagttgtggccaccgcattccgggcaggcaatgttgttgtcggcgatgaactgctgcatctgctcgttcgtccagccgtctgcggattcgccggtgaagtcttcaatgagcttatcggcacggtgacgggtcttgcagtccttgcagtccatcagcgggtcggagaagccgcccacgtggccggttgccacccagacttccgggttcatgaggattgcggaatccagcgccacgttgtagcggctctcctgcacgaacttgcgtttccacgcgtttttcacgttgtccttgaaaaggcagcccagcgggccgtagtcccaagagttggacagaccgccgtaaatttcggagccggggtacacgtaacctctgtttttgcagagcgccacgattttttccatggtcttttcttcgggcttcagaactttcttcatttgttaaactcctttcgcgccgctggctgctgcacggcttcgtgcagctggatgctgcgcttgtgatttatcaatcataccacgtttttcaaagatacacaactaccgcggcgggattttatacgaaaaagcggcactccgcagagtaccgcccgaaatttccgcttgtttagatttattcgccctcgtccgcgatgagctttttcatctgcggcaaacggaacagaataaccgccgcgataactgtgaagatgagctccggcagcatgtaagtgccgttatagcagaaggagtaaagccacgggtggcccacccaggaagcgccgaacgccacaaactcatcaaagtttgcaaagataatggcgccggaaatgaagtggcacacaaagcgcagcgcaacagccagcgccgtgccgcagcaaatgcccacataacccttcttgcggaaaatacccgcaatgccgataaccgtgtaggccacgatgtaatcgagcaaaatcgtgccgatgagagcagaaggcgtcatgccccagccaaggatgccgtccatcgtgatgccgaacgcaagctgaatgacggattccacaaaggaagccgcaaagccccacttaaggccgtacatgatggaaatcatggcgcagggcagcatggaaagcagcgtgatagaaccgccaaacggcatctgaagcaccttgatcaggctgagcacagcgcccagtgcgaccataaccgcgcaggccgcaagcttttttgtattgttgttcttcatagttcattcctccggttttctaccgagatttagaggataaagcggagaaaacaaaaaccgcgcacccattcggcacgcggcataaaaagcacttagaataagcgtattttcctacgtcggcattatccgaatcaggtaacaggtttcggcgttcacgccgctctcagccgactttatacgtcagcaccctttttttacattcagtatagcacggaacttttcgcttttcaaccaaaatttgtgttttcgggcagaaaacaaggcttttcttgattttagagaaacaaaatgatagtataaaagaaacataagccaacgacaacggtggttaaaagttttgcttaagctttttcaagaagcttaaagcgaacgtgtgcgttcgcttaggttcattagggcagcgccctaagtcgtcgtccgcagacgacgaaacaccttttgcctaacaaaaagtaggatgggaaccacaattagggggtctccccatgaatttgcaaggcaaattcataaaataaaacgctaaaaccgatttaaactacggaaggacatataaaaatggaaagcacacagaacaaaacgcgctgtccgcacagcaaaaaatgcggcggctgccaactgcagaacctcgattataaggaacagctcgcgcacaaggagcgcacgtgcatccgtctgctcggcaaattctgccgcgtagagcccatcatcggcatggagaacccctaccactaccgcaataaggtacaggccgcattcggtaccacgcgtgccggacgcatcatctccggcatttaccagagcagcacgcacaacatcgtcgccgtggacagctgcatgacggaagacgaaattgccgaccgcatcatcgtcgatatccgccgcctgctgcgcaatttcaaaatgacaacgtataacgaagtcaccgggcgcggctttctgcgccatgtgctcgtcaagcgcggctttcagaccggcgaagtcatggttgtgctcgtcaccggtacgccgatcttccccgcgcgcaacaatttcacccgtgcgctgttaaagcttcacccggagattaccacgatcattcaaaatgtcaacgaccgctacacctccatgctgctcgggcagaacgagaaaacactctacggccccggctatatcacggatattctctgcgggctgcgcttccgcatttcggcaaaatcattctaccagatcaaccccgtgcagaccgaggtgctgtacggcaaagcgatggaatttgcggagctcacgggcaaagaaaccgtcattgacgcgtactgcggcatcggcaccatcggcatggtcgccgccaaaaaagccggacaggtcctcggcgtagaagtgaaccgcgacgccgtgcgcgatgcccgtgaaaacgcaaaattaaaccgtgtgaaaaatatccgcttcgtctgtgccgatgcaggcaacttcatggtagatatggcaaacgccggtgaacactgcgacgtacttttcatggatccgccgcgcaccggcagcgacaccgcgtttctctcctgcgcgctcacacttgcaccgagacgcatcgtatacgtctcttgtaaccctgaaacgctcgcgcgcgaccttaattttcttacaaagcgcggctatcgcgccgaaaaaattcagcccgtagacatgttcccccacaccgaccatgtagaatgcgtcgtacggttggataagatgaattaaaacaaaagaaggctttcccatgattcgccccgttaccgaaaaggatattcccgcctgcggatattttcaaatgccgctcccgaaaattacggaagaaaggtaaaaaaatatggcttccagtctcatgcactacgcaatcacggataaaattttgcaactgtttcctatgcacgacggtgcgcggctgcgctttggcgcggtactgccggacgcttccgtaaacaagcggaaaacacattttcgcatttacaatgaaaagctcggcattcggctttatgatcttgaatcgtaccgcgcgcagttcggcgagcgtatgcaaaaagatgacctttatctcggctactatctgcaccttatcgaggatgctttgtaccgcaaaacgctgtacgataccttcggctggaatccctacacgccggaaagcaccgcgcgcatgcaccacgattacacgcttttaaaccgtcatttcattcaaaaatataatattcgggatgaccttgccgtcccagaaaatttcacgcaggaaccgattttcgcttttgagccgtttgacgccgaaggtcttctgcgttcgattcatcaaaactttgtgcccgcgccggcggatgccccctactttttcacggctgccatggcggacacgtacattgaagacgccgtgcggctgtgcaccgcggagcttgaccgctttcactgcggcaaaacgcttctttccgccgaggatttcacctggacgccgccggaaaacaataagaatttctgaataaaagcaaaaacaccctcccgaagtgatggatatgtaccctatataggaagcatatccatgaccgacacgggagggctttttgatttctctttggaaagcagcttcgcggggcaaacgcgctttcctatgcgcattcggaattgacattccctttccgcttcggtacaatagaaccaacaagaacctcgggggacaaaacagtatgaattttctggaagaacgtatcgtaaaggacggcgttgtaaaagccggcaatatattgaaagtagacagctttttaaaccaccaaatggatgtacgcctgttttgccaaatgggcgaagagttcaagcgacgttttgcagataagtccatcaacaaaattctgacgattgaagcctccggcatcggtatttcatgtgtggcggcggaatgctttgacgtgccggtcgtcttcgcgaaaaagagccagagtgtgaatattgatggcgacgtatacgtttccgaagtggaatccttcacgcataagcgtgtgaatcgcgtgatcgtttcgaaaaaatttctcggccccgaggatcacattcttatcatcgatgattttcttgcaaacggctgcgcgctgcaggggctcatctctattgtagatcaggcgggcggcacggtggaaggcatcggtatcgcgattgaaaaggggttccagcccggcggcgcgaaaattcgtgagatgggctacccgctcgaatcgctcgccattgtggaaagcatggacgacgcaaccggtacggtcgttttccgtccacagccataaaaggagttttgtatgaaacggtttttatcccgcgttttgccccttttgctcagcttcggcttgattttaaactgcacaggatgcagcacggttttggtcttagccggtaaagctcgtgaaaacagcgaagcttcgtcctccgtgatttcggaaagctccgcgtcctccggcgtcatctccacccctgtgccgaccgaagacggcgacctgcgtgcgttttacacggatgttgcaaacgctgaaagtgtcacggtaatggtgtacatgatcggctccgacttagagagtgaggacggctccgcgaccgacgaccttttggaaatggcagatgccgcgctttccgaaaacgttcaccttgtactccagaccggcggcaccgaaacctggtggaacgatgtctgcacagacgatgaaagtgagcgctttgtgatcgaaaacggcgatatgacgctgctccaaagccttggcagcatgaatatgacggacgccgacacgctctccgatttcattcgcttctccgccgaaagctaccccgcagaccgctacgagctcattttgtgggatcacggcggcggcaccatgacaggcttcggctacgacgagctgtacgaagacacctctttgacgctctcgtcgctctccacagcactgtataacggcggcgtgcagtttgatttcatcggctttgacgcctgcctgatggcgacggcagaggtggcctacgccttggatccgtatgcggattacctcatcgcctccgaagaatccgaacccggcgagggctgggcgtacaaaaactggcttacgatgctggcggaagaccccgccgtacccacggcggagctcggcaaaaagctggcggacgatttccttgaggcctatatttttgccgacatgccgacgctttccgttttagacctgcgctatgtgccggaattatacgccgcgttggaaagctactggggaagcgcctacaccgcactgcaaagcggcagctacggtgcgttttcgcaggtgcgcaacaacgtgcgggaattcggcgacaacgaatacgaccaggtcgatctttccgacctcgccacgctgacaaagcagagcctttccctcggcaccgaggacgatgtgcaggccgccgttcagaatatggtagtgtataacgtcacctatgaaaagtccgccgcgggcattgcagtctattttccgtgcctgtggccggattattacggtgatacacgctttgaaatgacctgcgtcggcttcccggaatcgtattttgaattctacgataaattcatgaacacgatgctctccgggcagtcgctttcgcagagtgatatcgatttttactcctactacgattggttcgattcctccgaggttggcggcgaaaacgtcaccacaataaacggcaacgattttgaactcatcgacaagggcgactattatgcactctctctttccgatgaagcatggaacctcatcacgtacattgatatgaccgtttacctcgacgacggcgagggatacattgaccttggcaatgacaacgtgtacgagtttgacgacgacggcgacctgaaagtcgattttgactatacatggatctcgatcgacggcgtgattgtgccgttctacgccgaaaccgaggaacagacggacgattattggtacacaacgggttatgtgccggccgaactgaacggcagcaccgatattgagatcgttctgcgctgggacagcgaccatgacagcggctttgttgcgggctaccgcttaaagaccgaagagcctacggtagcggcaaagggtctgcacagctttacggagacggatcagattcagtacacctgttcgtattatgattacgatttcaactacgaccgggactacacgctcggcgacccggtaacatacacaagtgaacccgtcgtcaactatgaggaaatcggcgaataccgcacggtgatccaatacaccctgcgcgacatctacaacaacgaacactttacagacccggtagagctttcctgtgaataaataattctatagaacataccctgctgcgctccgtagcagggtatgtttcgatttgacttacactataataggcggtataatgaaaattactgacaaaaacggaattgtatggaaaactatgccgtttaaactgttcggaaaggacgaacgccatgcgaaagctcctcgtttacatgaaagactacaagaaagagtcgtttttagcgcctcttttcaagctgctcgaagccacctttgagctgattgtcccactcgtaatcgcgcagatcatcgacgtgggcattcagaccggtgacaccggcttcatcatctcccgctgtctgcttctggttgggttcggtgtggtcggcatggtcagtgccatcacggcgcagtattttgccgcaaaggctgccgtgggctttgccaccgggctgcgtcacagcttgttccaaaaaatcaacggactctccttctctcttttggaccgtgtgggcacttccacgctgctgacacgcatcacaaatgacgtaaatcaggtgcagaacggtgtgaaccttgtactgcgcctgtttatgcgctcgccgttcattgtgttcggcgcatgcgttatggcgttcaccattgatcccggcagcgcgctgctgttcctcattgtggtcgctctgctctccgttgtggtattcggcatcatgctgctgaccatcaagcgctacaaggctattcaaaaccagctggattccgttttgaacaccacgcgtgaaaatctgaacggcgcacgtgtcatacgcgcgttctgcggtgaagacaccgaaacagaaaaatttatcggccaaaattcgctgctctctaagctccagaaatccacgggccgtatctccgcacttttgaacccggttacgtttatcctgattaacgtcggcatcattctgctcatccattacggcgctgttcaagtcaacaccggcattttgacgcagggtcaggtcgtggcgctgtataactacatgagccagattttagttgagctcatcaaacttgcaaacctcatcatcaccgtaacaaagtcctttgcaagcgccgcacgtatccgcgacgtgctcgagctcgacacaaacaccgtttattccgacgacaagaaaatctacaatacccacgccgtcgagttcgaccgcgtttccatgcactataacgaaggcgcgaaggacgcgctcgaaaacatcagcttcaccgccgagccgggcgagatcatcggcgttatcggcggcacaggcagcggcaaaacgacgcttgtggggcttattccccgcttctacgatgcgtcctccggcaccatccgcgtggacggccgcaacgtgaattcctattcgcttgaagaactgcgcgaaaaggtgcacgtcgtattgcagcgcgcggtcttgtttcgcggcacgctgcgcgaaaacctgctttggggcaataaaaatgccaacgacgaagagatgcaggcagccgtaaaggctgcgcaggccgcagacttcgtacagagtaagggcgggctcgatatgaagattaccgccgaaggccgcaacctttcgggcggacagcgccagcgcctttccattgcccgcgcacttgtgggtaatcccgagatcctcattctggacgactccgcttccgcgctcgactatgtgaccgaaaaggcactgcgcggcgcgctttccgcactgccgaataagccgacggtgttcatcgtctcgcagcgcacatcttcgctgcggcacgcggataagattctcgtcttagacaacggcgcgcttgtcggatgcggcacacacgatgcgctccttgagaactgctccgtgtaccgcgagatctatgactctcagtttggcggaaaggaggcagctgcgaaatgagcaagataaataacaaaaacagtaccattaaacgtgttcttttgcaaatccgtccgtatctgccgaccatcattttgttgcttgcacttgccgtagtcagcgtgctgtgctcgctgtacatcccggtgctcgtcggcgaggccatcgacgccatcatcggcaaggaacaggtcaactttgccgttatcctgcctaagctcttcacctgcgcggtgctcatcggctgcgcggcgctcgcccagtggctgatgaatgtctgcggcaacaaggtcacgtacaacaccatccgcgatatgcgcgaggcagcctttaaaaaaattcaccgtctgccgttttcttacctcgacgcacacgaaaccggcgacatcgtttcccgcatcattgccgatgttgatcagtttgcagacggccttttgatgggcttctcacagctgtttaccggcgttgtgacgatcatcggcaccatcggcttcatgctttccgtcaacgtttggacaacgcttgtcgtggtacttgtcacgccgctttccattttggtggcgcgcttcatcgcaaagaaaacgttcgccatgttccgcttacagtccgaaactcgcggccgccagacggcattcatcaatgagatgatcacgaaccagaaggtcgtgcgcgcatacggacacgaagacgagaacatggagaaattcgacaccatcaacgaagagctgcgccgccacacattaaaggcgacattcttctcctccatcacaaaccccgccacgcgctttgtaaactccgttgtgtacgcggcggtcgcgctcatcggcgcttttctggccgtgaccggacagggcttcaccattggtatgctctcctgctttttgagctacgcaaaccagtacacgaagccgtttaacgagatttccggcgttatcaccgagcttcagaacgcgctcgcctgcgcagaccgcctgcttgaattcctcgacagcgaagaaatgtctgccgaccccgaactgctgccggagcacagcgagaccgcaaaaggacaggtcacgttcgataacgtttgcttctcctatacaaaagaccgcccgctcattcgcaatttcagcttggatgtaccggcaggctgccgcgtcgccattgtaggcccgacgggctgcggcaaaacgacgatgatcaatcttctcatgcgcttctacgacccggacagcggcagcatcagcgtggacggcacgaatacgcagacgatcccgcgccgcgcactgcgccgtaacttcggcatggtcctgcaggaaacatggctgaaaaccggcactgtgctcgataacatccgcatgggccgcccggacgcttccgaagaagacgttatcgccgccgcaaaggccgcgcacgcacatagttttattgagcagctgccgaacggctactatacgcagattggcgaagacggcggcagcctttccgccggacagaaacagcttttgtgcatctcgcgcatcatgttgacgctgcctcctatgctgattctggacgaagcgacgtcttccatcgatacacgtaccgagctgcgcattcagcgcgcgtttgccaagctgatgcgcggacgcacctcgttcgtcgtcgcacaccgcttgtcgaccatcaaggaatctgatgttattctcgtcatgcgcgacggtaacatcgtagagcagggcgaccacgaatctctgcttgcgaaaaacggcttctacgccgagctgtaccgcagccagtttacggatgaggaacagccggtgggttaacgcacaaaaatgcagccttctctattcgagagagctgcattttttattttctgccataccgcacaaagctgcgttttgcactttgtgcggtattttttgaatatcaatatagtggaagttttagtcaatgcgtttgaggaaatcaaacggcaaaacgattatgataaagatataggcgaaccttgcccggactgcgcatgcgcaaactgcgtgcggaacgccttcggtgcacagccgtagcgctccgtaaataagcggtaaaaccggcttaagctgttaaagccgcatgcaccgcagatttcaatgacgggcatgtctccctgcaaaagcagctgcgccgccaaagacaatcgcttgccgttgatgtactccgtcggcgtcatgccgatgtagcggcgaaacgaccgcgtaaggtgctcctgcgacatatttgcaagcgccaaaagacacggaagacctgtgatgtaattttcgcgccgctccattttttcaagcagctccgaaaaccacgcgggcaaaatcgcttccggcgcgggtgctgtaagaaacagctgcaccaaatacggaaacaggcttaaaatgtagcggcatgccgtttcgttatcggcaaagcggttcgtgttcaaaagcttttcctgcacatccgttaaggtgtggccggaaagcacacaatgtaacggcagctccggcgtatcaaatatggcgcggtcaagccgcaaataatcgcacaagcgctcaaataccgtgcgcggaataccgatatcgagcagctcgaaatccgcgttgttgaaaaaatcatagcggtgcacgtccctcgggcgcatcaaaacgaacgagccctcggaaagcagctgcgagcgtccattcacggcgtggatggccccgccgtgcgagacgagaaacagctcgtaaaaatcatgcgtgtgaattttatacgtcgccggcacaccgcactggtgcagaacgcgcgcaccctcaccggtgtgcagattttcttcggaaaaatgcagaagttcaacgtcgctcattccggtaccccctttcttctgctattataacgcgtcaaaaaaacggaatcaagaaattttaaatataaattggggaggataacggtatgttcaagaccgatgttcaaaaactgcgcaatgcgttggaattcacgcgcgtttacaaagagaacgcaaacgacatttacctgcgtgaagccgtctgcatggattttcagcttcgtcatatcttagtgccgatggatgaaaacgacggcatcgcgggccgctatgagcacgactttgtgggcttttcctcgcaggtcggcggcatttacacgtattactttaacgagcatgaatttttgaacgcatacatggcttgtaagcaaaacggtgagatcaccgctgcggaggactacgctttgcaggctgtgcaggcctattggcacgaggaaaacaccgcgcgcaaggttgaattggaattttcgaagcgctacggctatgtgccgccgaaagcttttcccggtgcgggcgtgggcaactgcgactgccgcgtggcaggtacaaacctcgattttgaaaagctcatccgtctcggctttgacgggctcgatcaggagatcgaccgtgcggcggaagtgaacggcgcgtcttcgttctacacggctttaaagctgtggattgaaagcttgcgcggcgcatgcgagcgttaccgcgaacaggcattggagcttgccgaaaaagcagagaccgaagaagccaaaacgcgctttacaaagcttgccgaagcacttttaaacattcagcacagcacaccgaagacgttccttgagggcgtgcagctgatgtggatctacgctgtcagcagcgacattatgaattacagccgcatggacgattaccttgggccgctctacgccgcggatatcgacgcggggcgcatcacggaagaagaagccgtgcagaccgtgctgtatctctataagcactttaaagagattaacaagatccatgactgccgcgtaatcatcggcggcgtgggcagaaagcaccagaaggaagccgaccgcctcgccatcgtcatcatggaagcttcccgccgcttccgcgagactgtgccgcagctcaccctgcgctattacagcgacatggacgagaccgttttccgcaaggcgatggaagtgaatgcggagggcactacgttcccgattatttactccgatgagacgaatgtaccggctgtggaaaaggtctttggcgtttcgcatgaggaagccgagcaatatgtgccgttcggctgcggcgaatacgtcatggtcggttacagcgtaggcacaccgaacaacggcatcaacgtgctgaaagcgctggaaattgcgctgcacaacggccttgatttctaccagaacgtttcctgcggcgaaaagaccggcgacccggcgcagtttgatacctttgaaaagctgtatgacgccgtgcttgcacagctcaagccgaccattgaccgctttgctgtacacaaatacctcaactataaaattgcaggcgaaaacgcgccgtatttgcacctcagcctgcttttgaacgactgcatcgcgcgcggcaaggcgacgtttgaaggcggcgtgcgttacctgaatgcttccagcgaaatgttcggcatcatcagctgtgcagacagcctgacggccatcaaaacgctcgtttacgacgagaagaagctcactttgccggagctcatcgatgtgctggatcacgattttgaggggcacgacgatattcgccgcatgtgcctttccgcaccgaaatacggcaacgacgacgacacggctgacgacatcgcaacgcgccttttcaccgatattgccgaccttaccatggcggcaggtaaagctgcggggcttgaccactacaatattgtcagcgtcaacaactccatgagcgcagaatggggtaacttctgtgcggcgtctgcctgcggcagaaaggccggcagccccatggcaaacgccaacggcgcttccatcggcgcagataagtgcggcattacggcgctgctcaactccatgtcgaagtttgacaatacaaagcacgtgggcgttatcaacaatgtgcgcttcacaaaggagctcttcaagggctctatggataaagtagaagccgtcttgaaggcgttttacgacaacgacggcgtgcagacgaacctgtgcgtcatcggcaaggatgaccttgaaaacgccatggtgcacccggaaaactaccagaacctcctcgtgcgtatcggcggcttctccgcgagattcgtcacactgaatcctattgtgcagcgcgagattattgagcgtacgacctacggcgcgtaagcggaggccgatatgcgggatcttatttttgatattcaacgtttttgcgtgtatgacgggccgggcattcgcaccaccgtgtttttcaaagggtgcaacatgcactgtgcgtggtgccacaatccggaaagcttttcaaccgatgccgagctcttgtttcgccacgaaaaatgcacgccctgcggggcatgcactgcggtatgtccgaacggagcgcatgaaataaaagcagacggcacacatgtttttgaccgtgcaaaatgcgcggcgtgcggcaaatgtgccgaagtatgtccgaacgatgtcctggagctttccgggcgcgaaatgacggtggaagccgtgatgaagcagatcgacaaggacgcaaaatattaccgctcgtcaaaaggcggcgtcaccttttcgggcggcgaggcttctttgcactttgaactcctgaaaaagctgcttacagcctgccgcgaaaaagggtaccacaccgcgctggagacaaacggtttgatctctgccgcacatttaaaagaactgataccgctcaccgatctttttctgttcgattttaagcacagcgaccccgatgccctcaaaaaatgggcaagcgcgccgcttgcgccgatcctcgagtccctggcagcccttgaggacgcgcatgcgcatgtgtggttgcgctgtccggtcattccgggcgtgaacgacacggacgcgcactttgtgaggcgatttgtgcgctcaagcatcaatatacctgtattgaaaaggccgagatcatggcataccatgacatcggcaaaacgaaatgggacgcgctggggataccgtattcgctcgccgcgctgaagaccgtttcgccggaacagaaacatatttgggagactaaaatagccgattagcggcacttttggggataagagagggaacgcttcgttccctctctttgctttatctcccacattttttctaaacatttgacagatttcccggaatattgtatgctatggaaaacaccgcaaattttccctgcgggaccacaaacattaggaggtcacttatgttttgtatatactgcggcgccaccttgccggagggcgcgaaaaaatgcacactctgcggcaaccccgttttgcgcccgccggaagccactgcacaacccgtaagcgaaccggagtcggaatctgcccccgcatcggaaacgcccacggagcctgccgtggaagacatctcctcaaattcgacagagagcctctccgaagcggaaccgacacccgaagctgaagataccccttcaaacagtccggacagcgaagatatttacaaccattccccgatggacttcacggaggatatttcctccggcgatgcgctcggcgacaaacccgaaggcatggagcacgagggcacattcaccgtttcccccaccccggaggaaatttcagggccggagccgcgcgtgcaacccatagaatatacgtataacgacggctacgcctatgaagaatacgacgaaaagccgaagaaaaagcgttcttttaaatggcttttcatcgtgctgcccattcttatcgccatcggcgctacaatcggcggcattttctggtggtacaatgcacccatgcaaaagctcacccgcgcgcttgacgcttacgattattccgctgcggcgcaggtacttcccacgctttcaaaggacgaactcgcttcggtctccgaccaaatgcaggaatatgcccagacggtcatcgaccgatacaataaaaacgaagcgaactacgacagctcctatgagctgctcgaccgcctgcaaaagctgttcccgaacatcggtctcgacgatcagctcgacggcattcaatcgctgaaagactccaaagaggcctacaaaaacggcaaaagcctgcaggcacagggcgaagacggccgcgccattacggaatatcagaaggtcattcacgccgatgtgaaccacgacgacgcgcagacgcaaattcaaaacatccgcaccgcgtacaaagaaaaagtgttaagcgatgcgcagagccgcgcggacgagaaagatttcctcggtgccgaagccattttgatgaacagcgccgatatcctcggcgatgataaagacatccaggctaagctggaagagattaaggacgcagagctcaacaactacgtggaaacgctgctcagcaccgccaaaacgctcgcggatgacggcgacctgcccggcgctgttaacgtgctgcaggacgccacacgcaacgacaagcgcatcgacgcgcagattgccacctacaaaaaccagtataagcaaaaagttctcgatgctgccgcaaagcaggccggtgaaagccgctattatgacgcggtggaaacgctgcaaaacgccgatgacatcctctccggcgacaacgacattgcggcaaaaatcgaagaatacagggcgctttaccccgtttcgctgacagatctttctccaagcggcggcgaagattgcagccagaactggacagcctatgacgcaaacggcaatgcgtacagcaacggccttaacttctcgctgtaccctgtcatcgcaaaaaccgtctacaccgaatacgccccgaacggacaatataagcgcctgacgggaacatgggtcgtggagggcgatacctccgatgattttatcggcacggttcgcatttatgtggacggcaatttgcagtatgaagtttcctcgctcacggtgaacagccccgcaagcgcactgagcctgagcatttccgacgcttccaccgttcgcattgaagtgaagggcgagttcgcctcgctgcgtgccgtcggttatctgtaccttgcagatgcgaaatttgaaaactaaaccgctataaaaagagataccgcacagggtaaactcaccttgtgcggtattcttttgcgcaaagcctgccgtgcggtctatgcgcgtgcagctgatccttccacaatacagaaaaactctgtggaaaacacaacgcgcataagaaacgggatgtccctttttgggggacatcccgtcttactttggcttacgccttatgcttttgttccatcacgcgtttgctgcgttctcgtcttcgtcgttttcgtccttcctctttttgcagaggaccataacaacgacctgtaccagcgcgattacaacatggaggattgtccacttgtcgacgaagatcatcggcagggtcatgtcttcggtgaagatgaagacgatgatggcaatcagagccgggatgatgctgatgagtctccaaaggcccttcttgttcttttcgtactccataacctctttgccgttctcatcgagaaccacgttgccgtcttcgtcttccaacgccttctttttcttgccgatatagccgatgagaaggaggatggaaaggagggtcgtcacgatggtgaggatcaggttgatgagtgcccaagcgcccgtgccgagacctgcgagcggcgttgcgttatctgcgatatcttcaccgtttgcaagcggtgtttcgttatcgttgatcgtttcgcctatttcgccgtcattattgccatcgccttttccgccgttatcgctcggcgttgtggaaggtgtggcagtcggtttcggggtgggtgttgcaaccgtagccggaacgaccggagctaccggcgtcggagtaggtgttgccgggttcggattcgggttcggatttggagccggagtaggtgtagactcttctgtcggaaccggagtaggtgtagactcttctgtcggagccggtgtaggtgtaggctcttctgtcggagccggagtgggtgtaggctcttctgtcggagccggagtaggtgtaggctcttctgtcggagccggcgtaggtgtaggctcttctgtcggagcgggtgtaggtgtaggttcttccgacggagccggtgtaggtgtcggctcttccgacggaatcggggtcggcgtgggatttgcttcccaaacagccttcagcacaacgtccttagccggcatcgtgaacgcatcgttctcgatcgtaacctcttcgcttctccaacccgagaacttatagccctctctggtcgggaccgtctttataacctctactgttgctttgtactcgtacttgaactcgttggtcgcttcagtccactcgccgccgttgaggtcgtacgttacattgtacttgttcgtggtcttctcatacactgctacgtaagtctggttgcccttaacttccgtgtagtccttatcccagcccttgaacgtgtacgtatactgtgcatctgccgccttcgtcggttcaacaccttcgaacttcggtattgctccgtactcgtagtccttctggtcgatgagcgtcgttccgtcttcatctacccacgttaccgtgtacgtcttcacctgccaaaccgcatagagatcgttatcgccgttagcgtcgacaaagaccgtagcgcctactttgtatgtaaccgtattgctgtccggcgtggttgcccagccgaggaacttgtagcctgtgggagcggtgaagccgacatagtcacgcgatcttacggttgcggtcgtattcttcgggtaacctttgtcttcaaagatctgcgtgctgccctcgaaattataatgatacgtaatcttcacggtttggggcttattggtgtagactgccctcaacgtggtgttctttgtgacggtaatcttatcgcccgggtggatgagcgtgccgtcttccattttccaagcgaggaagttttcggaattttccggcggaagtacgcgggcggagctgccgcttacatacttctggttatccgttgctacgttttcgttcttgtcctcaacgtatgtgaccgtgaagccatcctttgcggaggggaagaacggggaaatcgtaacggagctgtaaagctcggtatctacattgaacagcgcgccgttggaatcaatccaagcggagggctgttccgtgaaatttttaagcagtgccttaaaatcttcggaatccgaaagctttttgccgtacggaatttcaatcgttttaaactctccgtccgcagaggccgtcaggtaaaccgtagctttaataaccggcgcctgccactttgcatagagcgtaatgttctgtgcgggcatcgtcttgccgtcgaagacatatgccgtgcctttgcaaagctcgttctcataccaaccagcaaacatgaagtttgcgggtacaccggccggttttgtcgggttgtagttgacatcggaaatattctgctgatacttgcggctaacctcgctatccttcgcacccttattcatgaatacgatattataggagttgcgggtatagtagaatttggcattattgtatttgccgcgaataggagtacttacattttcgttaaaagtaaaacctgtaatcggatactgatcttcttttgatactttatagcctctaccggggcttgtatcgtggtgatcttctttataggttattccatcgatagtaattgttccattttcgcccggcaaaacttctacaaaatagtacgctgtctcactgcccgaaccagtcttcgggccatagaactcgtcgccgcctaacggcattgtatcaatgttaacctggcttgtactaccgccatcacttgtgctccatgtgctgctgccattgtaagtaggccacttcttactgatgttcgcgccatattttgccgtaattctaagactggtatactcctgagaaggagaatattcccagccccaaccactactataactgtagaacttaacgtcgtaaacatttctcttataataaatgtttacgatcgtggaaccgtcaccagcaatggtcttctgctcaatcttctgtgcagtaaagccctgataatcttcatctttgctgctttttgcagtggcagctgtctttgcgccagtagtgccagattttatttcgatatccttcgaggaatactcgttatcatctgcattttcctgccaatggataacggtgtattccgttttggaattggctttccagtgcgcggtaacagttgcttctgcggaaacagacgttactttctgaccgtcgatataccaaccgtcaaacgtgtagccgttgcgggtgggggtgactgtgctcagattcagcgcttccattcggaactgcggcgccatgtagtcgccgccgtcggtattgaacgtgacccagaaaccggttttaactaccgggtaaacgtatgtaacgccggctacaaatgtgatagatgcatcgggcgtattgctgtcctgcgtggtgctccaaccgacaacgcctttttttttgcccatggtgagctcgacttttgcggtcgcggcgttcaaatctgcttccgcaacgttttcaccggctacgcctgcggcggtgtaataaaccacctttgtaccgtcttcattcatgaagtatacgtagctgtactcctcaaacttcgccgtaacggtcacttccgtgccgctgacagtcgcgactgtgccgaagcttaacggggtctcaccgacataccacccaacaaagcgtgcgttttcctttgtcggtgcagtcggctcgaggagctcatcgcctttggcgacggtctgttgccactcggtcagctccgtgccatctgcatcatagaaacggtaggtatcgaccttgggcttctcgtcgtccggacgcagcatagtcattgcaatgcccgtttccgcactctgtttcgccggtgcagtttcctctgcacctgcggcgggggtcgcctgtgcttccacttcaacgggagccggggtctctaccggggcgggagtggctgtctcctccggaacgggagtaggtgtctcctccggaacgggagtaggcgtctgctccggcgcttcggtcgcctcgggcgcgggcgtctcgtcaacgaccggcgttcccccctgcataacatcccctgttgcagtgtaggtgtttgtttcctcatcactcattgcaaacgcgcccgtaggacatgccgaaaccagcatacatgcgctcagcaacacggcgatgatcttctttttcatagtgttttcctccaatcctgtgatttgtccgttttataacaaatatggattcctaaattgatgtgtgttactgtgccaaaaccgtttccatttggatgagcagctccagcacactgcgaaacgcggcctctttgccgccttttgtccaccgcagtctcccctgccagctgtaattctggcggaacaggatgtccagttcaaacgtgggtgtttccgtacattttatgggagaagctttcggcgcgccgcctgtatccatctgctcttccaaaagcaggatcaggcgtgaaagacttcggaatagggtttcctccgggagcgtcccgccggagaccctgccgcggatgacaccgtcctccgcttcatccacaaagatacggaaggtctctgtgccgatcggtagcatacgattttctttcacctaacccctcccttttgtcttttgtgattctattttacacaaaggtgctatgagaacgctatgattaagaagttttttcatagaaaaacgacctattttctcataaaaaaagaaaataggtcgtagtttttttgttaactgtgttgcgtcaaccggttcatttttttcagatgacggttttaggcctttcggcgctccgttttctccgttgctttttcttctgcgttcatatgtatgtggcgcaggtcgagcgatttaaaggtgtaggccgcaccgcttttcgggtattccttttggaaccgattgaacacacggcgggaaacgagcccgccgttttcgccggtcgcacccggcagcagcacccaaaactggtttgcgcccacctttgtgaacgggtcgcccgcgcgcagttcgtttaaaagcgtcccttccatctgcttcatatatacggcacgcttttccgggtctaccgaacggtttgcaagccgcacaatcatcaacgccgcaggggtatcgtttcggcgcatctcgcgcacatgcaggtttacaatctcgcggaaaacgttgttatcacagcaaaacgcaccgggttcctgttcttttgcaagcaggaacgtgtgaatatcgtcttcactcgtctcgctgccgtaaagctcctgcaccgcaagcgccttctgcgcctccagctccgccgaaggcgaaacaccgtagacctcccggtacagcgaagcgatataatcatagtgttccagcgcttttttcgggtttttgttttttatgagcgcctgcatcaaaaacacgctgaattcctctgcggcgggatctaaacggataacgcccgtgcagagcttttccgcatccgtaatgcgtccgagcttcaaaaggcgatccaccgccgcgcgacataggcgcgtataaagcgagcggtaatacgtgttgaggttgatgcaccagaactccgctgcgctttccgtaagaaaatcgccggtgtaaagcgccacggctttctgcgccagggcaaccgatttttccatatcttcttcggcaagcgctgcctttgcaagtgtttcaaattgctccacgtcaagctgtgtctcgcggtccggcgcccagcgataatagcccttttcgttatggattataacctttgcgtgcgtaaagccgagctctgccagcgcagcccttgcgcggctgacattattttgcagcgtgcttaacgggttatcgttttcggcttccggccacagcaggtcaatgagctcctgtgcggaaacaccgcggtttctgttcagaataaggtatgccgtaagcgtccacagtcttctggagcgtcccgtgaggctcacggcgtgcggaacctccataccttcctgctttaatgtaaacttgccgaacatggtcacattgatcttcggcacaacctgtatcgtttcaccgttctgtgcttcacacggcagcccggtggtttcaatttctttcgctgttcgactcatgaacggttcatctccctctttcagaaataacagttcaaaatatcaccccggctattgcgaaaaaaataatattccgaacttgttcttttcataaagtatagcacgcttcacggcatttgtaatccaccgaaaggtggaaaatgcgatttttctcataagtatttacttttttgtcggagaaaataccttttttggcgaaaggtcgcgctaaaaactatgacttaaagtaattgcagacgtttttgcatggtctcatagttcgtgcagtagtaaagcgccgtctcctctgtgatgcgcttttgccgtataaggtccgcaagcgccatgtccatggtgcgcatgccctgcgccgcgccggaagcgatggcggcatcgagctgatgcgttttgctttcgcggatcatattgcgtatcgcgagtgtggaatacatgatttcaaacaccgggatgggtgtgccgtctacgccgggcacgagctgctgactgatgaccgcctgcaaaaccatggaaagctgtaagcggatctgcgcctgctggttcggcggaaatgcgtcgatgatgcggtcaatcgtattcgccgcgccggtggtgtgcaggctcgaaagcaatagctgccccgtttcggcggcggtcatcgcgacctccattgtctctttgtcgcgcatttcgccgagcaaaatcacgtccgggctttcgcgcagtgcactgcgcaaagcggcgacgtagctcgggcagtcgcaaccgatctcacgttggctcacaatgcacttatcgtggcgatggatgtactctaccggatcctcgagcgtcagaatatgtcccgcgcgcgtacggttgatctcgttgatgatacacgcgagcgttgtggacttaccgctgcccgctgagcccgtaacgagcacgatgccttttttcatctgtgccgcgcgcatgacctccggcgggatatgcgcttcttcggccgtaggcagaccgaagcggatgacgcgcactacggcggcaatgctgccgcgctggcggaacagattcacgcggaagcgtcccgtaccgctgagcgagaacgaaaaatcgtcatcggtcgcaccgccgtttaagcagtgcggctcacgcgcggcaagacgatagatttccgccgcgaacgcttcggtcttttcgggcgtgaaggcgccgtccgccgtttcacgctgctgttcgccgcgcaccttatacgtcagcggcaggcccgccaccacgaaaatatcggaagcgccgcgctccacggcacttttcaaaatttcagtcatattcattgtactccgcctttcttacccgaggttcagggagtcatccggctgccagcgcgctgtgcagcgccattttgcaatctcatagctgccgtttatcttatttaagcagatctcaagctgcatgttgccgcgcgtgatttccgttttgagcgtggtttcggtctcttccgtgttttccggcagatctcccgcgccctttaaatacgcatctgcttcggaaagccagtcttgcccggcgttttcgcaggcatacagcacttccacgtgctcgccgtagcgctctgcggcacggcgatcggatacggcagaggacaccgtaagcacgccgaaaatggcgacgcacagcacaacgaccgcgaacagcaccgcgatgctgccgatgcggaatcgatttcggctcatggcgttccctccttcggctggtagcaccgtacattcagcgcataaatttctttatcctgctccgccgtgtacgccgtgattttcccggcatacaacgctcccgtttcggtctcggcggcggtcacttcggtttctatataatagtaagcgtccgcttccgcacagcttgtcatatcttttgtgaaatatgctttttcgccgttttcggggatctctcccgcgcgaaacgcctctgcggcgctgcggcacagcgcaatgcctgcgctttccctcgccgcttcatcgctgatgacggccgcgcgcaggaacacgcacgcaatgacaccgcagcacgcgacaaatgccagaacaaacacaagcagcggggtcataaagcccatgcggtggcgcgtttcactgcgcttttcctcgtaatctatcatgccgcgccacctccgtcacaatacgcgccggcggtcatgccgtccgcagtgatcgttaaaagcccgttttccgaaagctcggctttaaacgttttaaggtcgcacagcttttcggcgttattggggtcgatctccgccgtgacccgtgaaaactccgtgcgcagcgcgttttcatataaatagatgcgcgtttcgaagtcgctttccggctcgcgcaggcacaccgccgggccctccgggccgtcgatcaggcggatgttccctttgccgccgcacgctgccgtttggctttgaatatacgaaagcgcgctgcgctgctttgcgtgtgcgtcgcgggcatccatcgtatcggaatacagccgcgcgcccgcaagcgtcaacaccaaaagcgatgcgatgagcaatgcatacagcagaagcagcatcagagaagtgctgtttctctttttcggttccgtcatgcgccctccttattcctcgccgcgcaccagcacctgaacggtcggcagctggttatcggcgaaaacctcgtatgtcacgatgtattctttcttattgaccgtaagcccgtagtgcttttccaaatattcaaggctttccgggtatgcaccctctaaggtgtagcactccacggcactgcgcaaaacggcttcgcgcacagcggcacggcccgtttcgcggatatcctcctgaaaaaccggcacgcacaccgcggtaaaaattaccgcaagcaccagaataagcccgaccgcgaaaagccggaagcttacttttcgattcaaaatacccataacttttccctcagattgcgctcaaaatgccgagcaagggcagcatgacgcttaaaagcgtcaaaccgacagacgcggtgagaaatccgatcaaaatcggctccgtgcggtcgatgacgctgcacagcccgttttccgcctcctgcgccgtgcggcgcgcgaggttttccgtcacctgcacgagctcgccgctctgcgcaccgccaagcagcattttgccgtacatggcgggcaatatcttttggtgcgcaaacgccgtcgcaatgccgacgcccatctgtgtttcttcacggcatttttcaagcgctttgtgcagctttttgtggcgcgtctgctcgatgcacagcgcaagcgcactgtcttcatccgtaccgctcgcaagcaaggcggagagcgtgtccatcacctcggagaccgccaaaagccacgcggctttgcgcgtgaagcggctcgtttccattgtatttctgagcttttcccgacctttatcggagcgcataccaaacgccaaaacgagcaaaacgatgcccaaaagccccgcaaacaccaagctgatgcgcccgatgagcgtcgccgcgagcacataggcataggaagatgaaagcaggctgcccgttaaattgtcgtacacgcgctcaaacatgggcagcacggcgaaaacgagcaccgccagcacgccgcacatcatcagcatcaaaacggccgggtatgtaagggtgctgcgcaaacggtcgtatagcgcgctttggcggtcatagtggtctgcaaggcggtcaagcgcttcgtccaatcggccggaaagctctgccgtactaaaaacgctcaaggcgtattccgggaaaacgccggtcttttccgccgctgccgaaaacggctcgcccgccgcaaccgaaaggctgatctcggtagaagcctgccgcaaggcggtgtccatgccgtcttcctcaaacagggaagaagcctccgaaagcgacgcgccggagcgcagcagcattgcaaggctgctgcaaaatgcgctgagctgttcctgagtcaaaaatttttctgccatgttcctcgtcctttcgcttttcctttaataagtgaaccgtgttgtgtattccgaatcgttttgaatctccccggcgggcatgccgcctgcggcaaaggtgatgtccacccgctgccactcatccgcttttgcgcggatctccacggtgatccacccctcgctctccacataaaagctgttccacgcgtggtaggtctcctcccccacataacccgtgatgagcttgcacggaatgccctcgctgcgcagcatggcggcggcaaggcttgcataatcaaagcatatgcccttgccggtctttaaggtctcatccggggagggcaggtagccgttctgcacggtcgccgctttttccgtatcgtattggatattcttcaccatgtagtcatacacggcggcagcaatgtccgcatcggtggtgcagcttgcgtccagctctttcacctttttgatgcaatcggagcttttgttgtaattcaccatctggttcgggcgcaggtacggctgaaattcatctttcagcgtcacgtcgcggtcttcgctcccgatgcatgcgtatttgctgtcgcccacctgctccatcagtcggaacgtgtatgtgccgtttcccatattgagcggaaaaaatgtcgcactgccgtcgttcggcaaatcatagttatatttatcctcgccgcagacaatctgcatttttaatcgcgtatcgctctgcgcttttacgccgatgatgccgtcttcaagctgggaaaggtcaatctctccgctgccgaacgcggtcgcttcatcttcattgaagacagaatcccgaaaagcggggacctcgtagggcgcggcgttgctgtccgtgacatcgcccgccgccggtttggcgtcgtttgatgccgtgccccgcactgcacagctgcaaagcagcaaaataagcgccagcgccgccgctaacagctgaattttttctttcatgccgcaccccctgtcttttctgtgtatactaaatattattttatcttgtttttgtcttatgcgcaagccctgtgtaaaaatcttccgtattgtccctaccgtcaatattttcaaaaaaacatcggaaactattgataatatataatattatagacataaatttcactaaaaatgtccaccgtgaacggcgacgtgctatatgacgagtacggcgaaatcacacagtgcagtttcaatgccgagttgctcgcgggcacgcccggtttacgcagcttgccgggcgttctttttgtttttccgaaattttggcgcaggagttttccacgaacacattgacaaaccgcgcaaaaaaacgtatgcttatatatagagttatatctaacttagaaaggagcgcttgcagatgacgtacaccattaaggaagcctcggacatcacgggcattccggcgaccacgctgcgctattacgataaagaaggcatcctgccgtttttggagcggaaggaatccggccacagaatgttttccgaacaggatctttccatgctgcgcattatcgaatgtttaaaatgcacgggcatgtccattaaagatattcgccagtacgcggtgtgggcacaaatgggtgactccaccctggagcaacgctacaacctgtttcttgagcgccgcgaggccgttatggcacaaatcaaggagcttgaagatcagcttaaagtaatcgattataagtgcaaatactacgaggaagccatagccgccggtacggaagacattcacaagcacaaaacaggccactgctgcgacgacgaaaaagaaaacaaaaacgcgtaagtttcgcaaaaaccaagggcacggagttttaaagctccgcgcccttttgttgtaaaagtcatagccaccccctaaaagaggtggttatgacttttttgcttgataagcttaactcaaccctgcacagaccacgtgataccctgcggggtatccttcacaacgatatggcgtgcggcaagcgcatcgcgaatcgcgtcggcagttgcccaatcctttgcctttctggcttccgtgcgctttgcgatgagcgcttcgatctccgcggcttcctcggcggtcatgccctccggcacagcggacttctgcgcattctgctcctcgcgcaacgcctttgcagctttcagcaagccgagggacaacacttcgtcaaactccttgatgagcgcaagcttgtccacgtcggaaagcttggctttcagtacgtcgtacagcgctgtgagtgccaaggacgtgttgagatcgttttccagcgccgcgcggaacgaaacacgcagcggctctatggcagcttcgtcgtgctctccctcatttttcagcgctgcaatgcgggaaacgagctttttgtacgccgtagcggtgttgtcaaggctctcaaacgagaacgtcagcggctttctgtaatgggactgtaagcagaacatgcggtatacaagcggcgcgtagcccttttcctcaagcagcgaaaccgtgagaaaatcgccctttgatttgctcatcttgccgcgcgcgtccaaaaggtgcagcacatggaaccagtatttgcaccatgggtggccgagatacgcttcgctctgtgcaatctcgtttgtgtggtgcgggaacgcgttatcgatgccgccgcagtgaatgtcgagatattcgccgaggtacttgatgctgatgccgctgcactcgatgtgccagcccgggtagcccacgccccacggggaatcccacttgagctcctggtcgtcaaacttcgactttgtaaaccacagcacgaagtcgctcttggagcgcttgttttcgtcctcttccacgctgtcgcgcacgcctacggcgaggctctcttcctccatgttgccgaaaacataatagttttcgagcttggaggtatcaaaatagacgttgccgcccgcgatatacgcatatcccttttcaaggagcacctctaccatgtggatgaacgtatcgatgcagctcgtcgccggaacgacgatctccgggcgcttgatgccaagcttttcgcagtcactgaaaaatgcgtcggtatagaactgcgcaatctgcatgacggtcttgtgctcgcggcgcgcgcccttgagcatcttgtcttcgccggtgtcggcatcgctggaaaggtggccgacgtccgtgatgttcatggcgcgggtcacgtcatagccgaggtagcgcaaagctttttccagcatatcctccatgatgtacgagcgcaggttgccgatgtgtgcatagtggtacacggttgggccgcaggtgtacattttgactttgccggcttcgtgcggaataaattcttcttttttctgtgttcttgtgttatagagctgcatacaggtgcttcctttctgcttattcttccttattcttctccgctttctgtgcggtcagcttgcttttttctctgcagcagctgttcagctcgccgtgcaggcgctcaatttcaagccgcatgcggcacatttcctgcgccaccgggtcggccacgtggatctgatccagcgtgctgttgtccatcacacgcttgccgcccacgcgcacgatgcgcgccggtacaccgaccgccgttgcgttatcgggcacggcatccagcaccacggcacccgccgccacacgggcgttatcacccacgcggaacggccccagcacctttgcgcccgcaccgacgagcacgtcatttccaagcgtcgggtgacgcttgccctggtctttgcccgtgccgccgagcgtcacaccctgatacagcgtgcagttgtcaccgataacggtggtttcgccgatgacgacacccataccgtggtcgatgaacaaatttttgccgatcgttgcgcccgggtgaatctctatacccgttttgcggcgcgcgcgctgcgagatatagcgcgcgataaatttcatattatgacggaaaaaccagtttgccttgcggtaagaccgcaccgccttgaagccggaatacagaaaataaacctccgcacggctgcgggcggcagggtcgcgtgccatcacggcgtcaagctccgcctttaacttagaaaacatgacgtaaacctctccttaaaaacaaaagccccgagcgcacaacataggcgctcgggggcgaaatgtatcaaaacattcatgatacaataaatccgcggttccactccggtttatcactcaaacggcgtaacgtgccgtacccgtatgcggctcactttcgctcaccgcatccgctcgcgaatgcacttcgcccggctcttttctgcggcggctttcagcccatgacctccgctctctatcgactgtccccggggtactcgttcggtctcagcgtttgctttatgacagtattttaacacagcccctttaaaaacgcaagcccaaagatcacctctccgcgccattttatgcggcttttttcttttggttcttttaaaatacgcgcatgcaaaaacagggtacgcacttttttacagtgcataccctgtttatttagcaatgattcaaaaattagagctgctcgtcgatgatctttgctttttcaagcgcacgcttctggagcagtgcgtcgatcttggcgtgcgggtcaagcagggagctgatggaagcgtcgtggttcaaagcggagatgaagtaagcgatgtacttcgaaacgtcgacttcatggaaccacgggcggttcttcagttccgggttaaggtacgtcaggttgctgccgaagatgccgtcgatgaggccctcttcatacgctttatcgaactttgcgaggccgttcgtgaagatggcatacgtgccgtaagcgaagaagcggcgtgccttgcgggccttgacgttctctgcgatgtcgagcacggactcgccggaggagatgatgtcatcggcaacgaacacgtccttgccctcaaccggggtaccgaggtactcatgtgcaacgatcgggttgcggccgtctacaatgcgggaataatcgcggcgcttgtagaacatgcccatgtccacaccgagcacggaagcatagtacatgttgcggttcaacgcaccttcgtccgggctgacgatcatgaagtctttcttatcggtggaaagatccgggaagtccttgaagagcttctttaaaacctgataagtcggcatcaggttatcgaagcccataaccggcacagcgttctgcacgcgcgggtcatgtgcgtcgaaagtcaaaacgttggaaacgcccatctgctgaagctcctgcagcatgtatgcgcagtccaaagactcgcggtagctgcggcggtgctgacggccgccgtaaagcagcggcatcacaacgttaacgcggtgtgccttaccacttgccgcctgaatgagacgcttcaaatcctgataatggtcatccggggacatgtggttctggctgccgaagtagttgtaggtcaggctgtaattgcctacgtctacaacaaagaacaggtcatagccgcgcacggtcgacttgataagacccttgctgtcgccggaagagaaacgcgggcagctgttttcgatgatgaacgtgtccacatccataccggcacgctttgcccaacgcaccagatgggcctcaaccttttcggaaagctcacgcgcaccggcaagcggtacgatgccaagcggtgctacgcgattctctgcactgaaaaacgtctgtgattccattgccatttgattactccttcaaactgcatattccgttatttgcctgtccgttttacacgaacaatgtcggctcttgtctatttcaatatagcacaaaatagcgagaatttccacagcaaatacgcaaaatattaaacttttgttaaatccgataagagggcaatgccaaacggagcgagtttgattgaatttaccgtttgatctgtaccgtacaacttgtagtcgcgcggcaattccacggtttttccgctttccgtgtagttttctacaaaaatgatattctccttttcgccgtggcggatgtgtgccgttacgccgtgcggcagggtgcaatcgagcgctttttcaatgtgcagcgtctcaatcatttcgccgtacagtacagaaagcatatcgctgccggtacaggccgcaatgtaatacgcctctcccttgccgaacttgtttttcgtcagcgccgcttcgcctgcgtagaaatctttttcatatgtgccgagcacctccgccgtcagcgggtggatacgtgcacaaagctccatagcatcgtaacggctgccgttaaacacaatgccgtttttcatgccgtccggcaggctgtcgatttcttcgttccacacgccgaacacgtccatcatgtcgccggggaggccgcccattttgcacaggtcggtatcgtccacaatgccgctccagtacgttgtgacgagcgtgccgccgttttcgacgaacttgcgcatcttcttttcaaagcctgcgcggtacatatagagcatcggcgcaatgacaagcttatatttcgagatgtcgccgtccatatcgacgatgtccacctgcacgcccttatcccagaacggacggtagtgcgtcaagagcgtctccacgtatttttcgtctttatccttgttgcgtgggcccgcggcggcatccaacgcccagcggttttccacgtcgtacacgatggcgacctgcggcttgacttcggtgctgtatacgtcgccgcgctcgttcatgctcttaagctcagcgccgacggactgcacgtccttaaatacacgggtgttctcgttcgtgacggagtcgaacacgccgccatggctgacatggtcgacgaccgcgccgtggaacttttcgcaggagccgcggctttttctgaactggaaatactgcacggaatttgagccgtgtgcaaccgcctgcatagaggaaagcaggtgcatacccgggcgcttcagcatactgatgggcgtccagttcgtcatgctcggtgtgctttccatcaaaaggaagttttcgtgcttgatcgaacgcatcacgtcgtgcgtcatcgcggaagagaccgcaatctctacgttgtcggtcgtatgccactgcgggtagttgtcccaggaaacaacgtcgagctccggaccgaacttgaagtaatcgaggccgtcgtagaagcccatcaggttcgccgtcaccgggatatccgggtttacttccttcacggcgtcgcgctccattttcatgaaatcgacggtctggtacgtgacaaagcgcttccaatcgagcgtcagaccgtgcacgttcatttcgccgttcggctgcggcgcgtgaatctgatcccagctcgtatacgtgtggctccagaagtccgtccaccacgcgtggttcaggtcgtcgagcgtcttatacttctttttcagccaatcgcggaacgcctgttggcacagcgggcagtagcactcgccgccgtactcgttagaaaggtgccacaaaatgacgcccgggtggtttgcaaagcgctttgcaaggcgcttatccatctcgcgggtcttctctctgtacacgggggatgtatagcagtggttatggcgtgcgccggaaaggtcgcgcacaccattattctgcacacggcgaatctcctcatacttttcgctcatccaaagcggctttgcaccggacggtgtggccaacacggtataaatgccgtttttgtagagattgtcgatgatcttctccagccagtcgaagtcgtattctccctcattcggctccagatgtgcccaggagaaaataccgaccgacacgcagttgatatccgctttcttcatcagctccacgtcctgcttgagaatctcggggtagcgcagccactgttcgggattataatcgccgccatgcagcagcttcggaaatttcggtgtaaggggtctcataataaaatacctccgtcagcgcgacttcccgcgcgtaatctacacccagtatacagattgtacggacaaacttcaagagtgaatttcacattcttcattctttagtctttgacgcgttcttatgcgcatataataaagaaaagcgcacagattttgttttctgcacgctttttagcttcatatttttctgaaaggcttcttttattcgcccgctttactttggcttgtgtcaagttctctcgtcagcttatgcattctcaaaaaatacgtcgtgacaagcagaatagccgcaccggtccaagcagtgacctccgcatagaaaataccctcctgcccgataataagcggcagaaacaacgccacgccaatacgcatcaaaaattccatgatgcccgaagccatcggcatgatggtatcgccaagccccatcagcgcggagcggtaaatgtgcagcatatagaggatagacagacaaatactcatgatattaagatagtgtattgccacctgcgatgagatcgacacttcctccgccgtgccggaaataaacagtgcgatgccgtattttccgaaaatcagcacaaaaaccgtaatgacgaccgaggtcagcaaagcgatccacgttgcggagtgcataccctttttcacgcggtctaaaagccccgcgccgagattctgcccgacatacgtcgtcacggcgtagccgaacgaaacggcggcaatctccaaaataccgtacagcttattcgttgccgtaaagcccgccacgaacagcgtgccgtagcggttgacgaccgactgcaccaccatgccgcccacggcgatgataacattctgtgcggcgaccggcgtaccgagccccaaaaggcgctttgctatttccggattgagccggaaatactcttttttcaggtggatgaccttcacgtgcagcacagcgcgcaaacagtaaagcgctgcaaaaagctgtgcgatgaccgttgcaacgaccgcacccgcaatgccccagtggaacaccataacaaacagcagatcaagcccgatattcagaatagatgcaatgaccatggcatacagcggcgttttgctgtcgccgagcgcacgcaggatgcttgcaagcacgttatacgccatgatgatgggtatacccgcaaacatgatgcgcaggtatgtgaacgcgccgccgatgatctcctccggcgtgttcatggcgcgcagcacgggtgccatggcgacttggctcagaatgacggtcaagattgaaatgaccgccgaaagcgagatcgtcgcgccaatggaacggttaagaccctcgtggtcttccgcgccgaaacgctgcgccatgtaaatggaaaagccctgcgcaaagccttgaataagccccagcacgagccagttcagccagtccgccgcaccgagcgccgccagcgcgtttacgccgagcgcctgccccacaatggcggtatccaccaccgtgtagaactgctgaaacacgttgcccagcatcagcggtatcgcaaaggtgaaaatcagcttcgcagggctgccttttgtcatattttgaatacgttctgtttttgccataaacccctcatgatttcgccgaaagtttttccggcaatttgtgaatacgaatgtaatatgtcacgcacagcagtgccgccgcgccgaaccacgcggagacctctgcaatgcagatggaaagaaagcccagattgaacactttagagagcacgagcacaacggaaatgcgcagaattagctccagcgcgccggagagcatcggcaccaccgtgtcaccgagactttgcagggaaaagcggtagacgaacagcaaacccagcacccacatcatcgcaccgccgcacagcaaatacggatacgaagcttcgatgaccgtctgctccacgccggagacgaacaccgccgtcagctggcgaccgaacagaatcattgcgccgccgatgaagaaatcgacgatgagcaccatcaaaatgccgcggcgcacaccgaccttaatgcggtcaacgcgtcctgcgccgaggttctgcccgacatacgtgccaagagataacccgatgatgttgcacggctgttccgcaagaccgaagattttcgagcccgccgtatatgccgccacaatcgtagaacctaaaccattcacaatgccctgcaagatcataccgccgatcgccgtaatggaattcataattccgaccggcaagccaagcttcaataagccaaaaataatagacttatccatgcgcttttcgccggctttaaaacgcaaaaccggcatacggcacaacacgaaaaaacacatcaggccggaaagcagctgtgccaaaacggtcgcccacgcagcgccggccacaccccatttaaaggccatgacaaacagaatgtccagcccgatgttcactgccgaactgatgagaatgataatgagcggcgacatgctgtcgccgagcgctcgaagaatactcgaaagcgtattgtaaaacaccgtcgtgaaaataccgatgaaaataatgcggatgtacaaaagcgcgtcgtcaaaaatatcggtcggcgtacccatcagtgtcatgagcgggcgcgagaaaatgagacttaacgccgtgatgaccgcagcgctcataaagccgaggtagcccgcgttcatcaccgtgcggcgcatgtcgctttcgtcacctgcgccgaagcgttgcgaaatcaaaatggaatacccgtgcgtcaaaccgttgatgaaacccaaaacaaaaaaatgtaccgaacccgtggaacccgccgccgcaagcgcgttgacgcctacaccgcggccgagcaccatagcatccgccacagagtataactgctgaaacacattggcaacaagcaaaggcagtgcaaatgccaacaaaagctttaccgggctgcccttcgtcatattgcgaaccacaaaattgctcccttcaaaagacactttgattaccattatatcggataaaatgctgcaattcaatgcccatatgtcgttttcgaggggtgtaaacgccgaattttcctattcttttttggctaatttggcgctatttcggcttcagcaacaagccgtgtaaaaaagcagcgccatgcaaaagccgcacagcgccgcgtgaattttgttcaattaaacgatgtaatcgaccgcaaccgccttttcgcgaactgtcgcaacatagatcttcaccgtgttgcagtggtacgggtctttctggtattcttcgagcgcctcggggctctcgagcgtaacggtcaggcagacgtcaaaggagcgctcggagtggaggaaatccgcaccggcttccacgtcaagtgcctgcggcacgcggcccttcatcgtcataaaaagatcgcgcagcttttcgcactgctccttggaattgtccttgagcttgatcattaaaacatgttttaccatttgaaaaacttcctttcggataaaattattgcatagctaaagaaaaccatggttaaaagttttgctcaagctttttcaaaagcttgcaggttcttagggcagcgccctacatcgctttccgcagaaagcgacatctttttgcgttcgcaaagtcaggaagggaagacgagacttccggtggacgtttcgtccgagggaaaccctactaaggggtttccctatgaacttgtaacacaagttcataaaaatcgaacccagtcttccccgaaaggcggccaaagccgcctttaaaaaatcgacttattctatctaacacccgaaaccgccctgtcgagcgcgcccaagtccttgtgaatccgcacatcgcgcagaccggcggcttcaaacagcgcctttaccgcctgcccctgcgtctcaccgatttccacggcaagcacgccgttcgggtgcaattttttcgcccaaatatcgcagatcgcgcggtagaagatgaggccgtccgcgccgccgtccagcgccgttttcggctctttctgcacttcgcgctgcaaaagcggcagctcgcttgtctcaatatacggcgggttcgacgcgatgaaatcgaacccatccggcagcgtctccgcaaaagctttatctaacatgtcgccctttaccgccgtcaccggcagctccgggtaacgcgccaaattctcgtttaaatagttgaatgcgccgtcgtacagctccacttccgtcacttcggcgtgtgcttccttcgcgatggaaagccccaccgcacccgtgccggcgcaaagatcaagccccttcggcaaattctcggttttcgacagacgcttgcacactgcttccaccaaaacagcggtgtcctcgcgcggaatcagcacgccctctccgcaggaaagcgtcaggttcataaagtcccactcgccaagcagatattgcagcggctcgcccgttttgcgcttttcgagcgcggaaagcaccgcttgctccgcttcagactccgccggcttatcgccgtgcagcaataactctgtgcggttcgcgccgcagaaatgctccaaaaggcacgcggcttcaaacgtcgggtcttccgtgacgggttcaagcgccgttttcgctgcgcggtacagctcgcccagcgtcatcggataatatcctcgccgttttccgggataaccgctttcatcgccgcaatagcggcttccatcatcttgtcggtcggctcttttacggtcaaacgctgaaaccacaggcccggcgccgcaatgatgcgcgtcagcacgttatcgtacttgccgcaaagcttgatgagctcataaccgatgctgacaacgatcggcaggcacaagagcttacagaatgtgcgcaggaacggattggaaaacggaatgaaaaagccgatgatgatgccgagcaaaagcattaagatcataaagctggagccgcagcgcgggtggaagcgcttttgcttccgcacattttccacggtgagcggcaggtcgttttcatagcagaaaatcgtcttgtgctccgcgccgtggtagcggaatgtgcggtcaatctccggcattttagagatgacaacaatgtacagtacaaaaatgacgatacgtaaaaggccctcaaacaccgaacgccaaccactgatgccgtcgcccgtgagcatcatcagcccgttaaagagcaccgccggcaaaaagaagaacagtagcaccgcaagcgccacgcccagcacactgcccacggcgacgaccgcattcatcaccttgtctccgaatttcttttcgagccacttttcaaatttcgagggctcttcctcttcctcgccgcccactttatccgccgaaagcgtcagcgccttcataccgaggcgcagggtatccaccatagagaacacgccgcgtataaacggctttttcaaaatggggtatttttcgcgcagcgacggcgtggaaacctcctccgttgtaatatttccggcttcgtcacaaaaagccgctacgtttttcttcgggccaaccatcaaaatgccctcaagcaaggcctgcccgccgatagatgttacgcgttttgccattctttctccttttgcttataaacaatatttaatcctgttttctctccacgacctgcacctgcgcggtggcggtgggaatctgcgttgtattggaaagctcgggattcatctcaagctttttcatggtcggtatcgtgatgatgaccgtggtgcccatgccttcttcgctgtcaatatcaagcgagccggagtgcagctccatgatctcatttgcgacggcgaggccaatgccgttgccgcgcacattttggtttgctttgtagaacttctttttgacgtttggcagatgctccgccgggataccgcagccactgtccttgatgatgacgcggataaacccgtcgtcctcatacgcggaaacgcgcaccgtaccaccgggattcgtgtattttaaagcgttgtcgatgacgttgatgaacacctggcgcaggcgattcacatcgcccaaaatcggcgaaagcatcgtgtcttcctcatcgtaaatgaggtttttatgctccgttcgcgcgcggtcggtgaacatgtacacggcttcatcgagctccgccaaaagatcaatcttcttgaggatcagccgcattctgccgctttgcatgcgggaaaaatccagaagctcctccaccatgccggaaagacgttctgcctcgcgcacgatgacgttcatgcccttatcatacgtttcgcggccgatgccgcctgtttgcagcgtttccgcccaacccttaatagccgtcagcggcgtgcgcagctcgtgcgaaacagaggaaatgaagtcgtttttcattttttccgctgtgccaagctctgccgccatgtcgttgatggagtcgcacagtgcgccgagctcgtcgtccttctctttcttgacgcgcacgtcaaaatcgccctttgcaattttttccgccgtagcattgagttcccgaatgggcgtgataatagaccgcacgaaataaatgcccgaaagcgtgacgagcaccaaaatgagcacaccgataccaatcaggaccagcacgacatacgtaatctgccggtctgcgcgctccatagagacgatgtaccgcaccgcgccgagcaccgcgccgtttgcgccgcgcgccacgcgcgagacggccatgaccttctcgccgcttgcgagcttgccgatccaatagccgtacccattttcgctgtgcaaggcgctttcaaaatcgggcttgctctggttttggtccggcgcaaagccggaggatgtagacaaaatgctgcccgaacgcgagaccgccatgacctccatgaggtctttatccgggaaattttcggtgtagcttctggctgcagcgttaaactcgcttacggttttcatgctgccggaaagcacggtgggcagctcgtcgctgcgaccgatgagcgtcatttgtatgccgttataggcatagctctgcacaacgaaagaaagcgccgcaatacaggctgtaaataataaaatcatcacaccgaggctgttaaacagccagcgtcttgcaataccttttttgaacacgcgctttcctcctttctgtgcttctttttgtagttaccagtatttttaaatgacttgccctgcaagtcatcagaaaacccatgcaactgggttttctgcggttcaacagtccaccggactgttgaacctactttcctagttttttattaggcaaaaagatttcgtcgtctgcggacgacgcctcagggccttgccccgagaccccataaactttctgaagaaagtttaatcaaagacttcattcgtttgctttcacgcaaccttttgattacttatcccaccgatagccgatgccccacacggtgacaacatgtctcgggttcgagggctcgtcttcgatcttcattctcaatctgcgaatattcacgtctacgattttttcctcaccgacatatccgctgccccagacgtgctttagaatttcggaacgttttaacgccttaccggcatttgagatgaagtattccatgatctgaaactccacctgtgtcagctccacggggttgccgtcttttgtgaatgagcggttgcgcaggttcagcacgaagcggccggagcgcagctcttcggagaaattcggctctgcggctctcgtaaactgtgccacacggcggtaaacggcgtccacgcgcgccacgagctcagaggggctgaacggcttcgtcacgtaatcgtccgcgcccatcatcaggcccgtcaccttgtccatttcctgcgttttcgccgtcagcatgatgatgccgatggtcgcgtttttctgtcttaattccttacatacggcaaggccgtccagactgccgggcatcatgatgtccagcacagccacgtcaaaatcgccgccggcctgctcgtacacgcgcaaggcttcctcaccgcttgcggcttccacgcagtcgtaccccgcgcgctttaaattgatgaccacaaactcgcggatattctgctcgtcctctgccaccaatatctttttcatgttcgtttcccctttctgtcccccattttcagtctatatttattccagcacttcaaatccgctttgcagcgttttttcgtcgctttccgccatggaatcgtccaaaatgcgcagcacatacacgcgcccggcggagctgctcaacagaatatcttcgtcatcctgttctttttccgcccagtcttcctccgtatatacccgaatggagaacttgtcctcccggccgaggtaattgccgttaaagccgatctgtgtatacgtaaagaatgtcgctgtgcgggtcacggtgtcattttggcagccgtagttatcctcgctgctcggcaaaaacaggttgtagttttccgctgtattcaaaatactcgtgcacaccggcgtcaacgtgttgtcctgtaagctatacgtgttccacgtgatgacatacccggtggaatccgccgtcgtttcgctgccgtttatcgtcaactccgccgttggaatctccaaaatgccgtctttattcacatcgcgcgagaccgctgcggccgccgttggccgatccgtcgcgttttcttcgttcgacagcggcgaaatgagtctgtccgacgcttcgtcatacccgatgacctgcgtcagcatgcgcccgtccgctttcacgccgtccagcaccgctgcgcgccgccaagaatttacctgcgaaaagcttacggaggtgtaacgcgtcaccgccgcatcgagcggcacggttttggagacatacggctggtcgccgtcaaagcggtataacccgccaagcgccataatctcttctccgctcgtctgcgccgcctgcaaaacgaacagctcttttatattgtcgctgtcaaaatctgtcagcagaatttcgctgtatgagaccgttgtcatggagaattcgcggatcgtgtctccgtccacataataaaccgaaacgcttgccgtcgccgtgagcggatctccccagcccacgatgatctcgtccataccgtcgcccgtcaggtcaccgaaaaacaccttgtccacctgcgttgccgccgaggtaaaccgcgccatagagttccaaacgccgtccgtgtttttcttaaaaaattccagccgcgtgccgcccgcgtcgccgtttgcacagaaactcacgacctccgaagtgccgcacccgtctaaatcgcgcgagatgatcgccgagcggtaatcaccgcatttcgggtaaacaagcgtcacgtcacccacgccgccgcccatcagggcatatatcgcttctctgtctgccgtcgtctttggcggagacatcagcgcttgcgcatcaagacccgtcagctcgctgcaccccgaaaaagaaagcgccaaaagcacggcgagcaccgctgcaaaaagttttttcagttttccgcgcatcgccgtcacctcctgcgcaaatttacaatatcggtataagtatagcatatcccccgcaccgccgcaagcagtcaggggcgctttggcgtcatataaaaattaaatttctgtgacagcattgagaaaccggcgcgtgcgtggtaaaatggagaaaatatctcgaaaggattccgcatgaaacaaacaatgcacaatacccgcgtgcgatgggtgctcggcattctcattgcactcacgcttgcgttcatctggagcaactccatgcagagccgcgcggtctccggcggcatgagcggctccttaaaaacgtggctcgagcagcttctgcacacagaaatcagcgaatttttgctgcgcaaggcggcgcatttttcggaatacggccttctgggtgtggaattttcgcttctgctcggcttacagcacgataaaaacggcaaaaatctccagtgtgggcgcaatcttctcgactttccgctcatcggcatgctgtgcgccgtcacggacgagaccattcaaattttctccggccgcggttcgcttgtttccgatgtgtggatcgacaccgccggcttttcgaccggattctttttgaccgttctgctctttctttttatcaatcactgtaaaaaaagccgggtaaccggcaaccggaaaggataaataccatgaaacagcatattttaaagaagattcctctcttcgtcaccgtgtccgttctgctcgcgtgcatcgtgttttccggctgcgcgggccgcaccgtcatcacagatgcgcaattcaagtccgcctgcgaagctgccgactgcgaagtaacggacgtttccgaccagtttgacagcagcgtcatcacaaaagcgctgaccgtttcgggtgatgattactccttaggctttttcacattcgcttccacggacagcgccaaaacgaactacgcgcagatgctttcaagcgtcaggacctccgagggcaaggcggtcgattccagcgaatacaaccgctacacgtataaaggcgacgacctcacaacggtactctaccgcaacggcaccacgattcttttcgccaccggcgcggataaggacactgtaaataaagtcgtaacagcgttgggactttaacttttaaaggctcgtcggcaaaaccgacgagcctttaaaaatacctggtcatgcgggcagcggcgttcgggatgaatgtttccgcccgctctgctatataagccgccgttagcgcacccgcgccgacgtactccccatactccgtaaacaggctgcgcgccgcgatgcgctctgaaaaccgcaccgtcacgcacaggaaaaaccggctgccgatccgccccagtgccgaagaaagaacatggagcgtgtgcacggcacgctccaccgcatccatcaaatgccccacggtctcaaagcaaaacgtcagcggcacgggcggcgaaacgatacgaatgccaccaccccctttccgttcccaaggcacacccgcaggtgtatcttaaaccagtttacgtcaaaggcaggtacaccgtgccgattttttctttgaaaccttgacattttctttttacgttctgatcattaccaaagttagttatgatctgacatcggtgaaacgctgaaccggccgcgccccggtgtgacccgtaccgtaaaggaaatagagcaaaaagactacctacaaaagaccgcttccgaggaagacggtcgcgtgacctacatttccgcaacgaaagcttcagcggtaatgtaaccggcacgctaaacaccggcaaagctttccgtgctcaaagcagaagcggcaaagtggatgttccgttcgataccggcgaaggcacatgcaaagtcagcacactcagcggcagtatccgcattaaaattgcaaaataacgtaaaaaatctctctcggctgcgccgagagagattttcaatttcgaaccttattttactttatttctgaacttcggtaccaacacggtggcgagcacccagaacaactcgtagataacgagcgcaaatgcggaaatctgctccacgcccgcaacgaatgtgaggaacgccacaagcacaaagccaatgacgaccgccgcgttctgcatggcgacgatgaagctgatgttcttcttttcatcaatgcacgtggaaacaaggctcatcatggattccacacgaccctttgtggcggcataggcgtccacgcggtccgcagtgtcgttcacaaggtggtctgccgggccgtcttggcctgcgccgatgacattcaccgccgtggcgtcaatgccgaacaggcgcgaaatgaactgcggcgtaaggttcgggtctgccgaacgcagaatgagcgaaacgccgttcatttccatgttctgcagctccgctttcttctttcggtctgcgttataggtcaggatgaacatggcgtaaagctcgccgcccattgcaacgtacaagatctgtcggctgcccgtcgtgtactgactctccacattttgctccggcgcttccacaccgtgcgcagtcaaaagcgtacgggagccgatgagcacctctttgccgtccaccgtgcccacaacgccgtttccggcctcaaatgcggccttttcgacctccggaagctcgccctcatgctcgctgaacacctgctcgaacacgccgcaaagcgggccgccgagctgctgcaccaacgtgccggcagccaaaacggcttcttcaaggccctcctgcttaaacggcttcaccccgttcaaaacgaccgtgccgcgcgggaaaagctctgtggaatcaaccagaacggcatttacggcgctcatgcgcttgataccttcatagccggagaccatcgcgccgcggcggcgcaggcggtgggaaagacggctcaccggcaggtttacggccagcatattcatcaccgctacacacacgcagcaggaagccgccaaagccgtaatggcaagggacgcatctttcgtgatgacaagcgccaccacgcacagaagcagcgaggagatgaggcccaccggcgccaaaacctgcgaagaggtctctgccgggtccggctcataggaaatttgtaagaagcgctttaagaagcccgctttctgctgatatgcgattgcaggctgcgaaatgacggaggaacccgccatttttaaagacgtgttgtaatcgtcaaatacgcgcaccgcatatttctgctcgcgggaagacacaaagcggaaattcgagtggatgcggcgcagcatcgtcagcttgccgacggtattcaggaacagaatacctgccgcaataccggcgtaaaggtggattttacccatgctgagcgcagccggcgcaaacagcgtgcagagcgtctgcacaaaaaccgccacacaagctaccgcagcggcagaatccgaattcgcgcggaactcaaacagtgccttcagaccgtttaaaatcgttttcgcgcagaagccgatggacactagcagcagcacaagcgataagatggtgtagcccactgcaccggcggtctccgtgttattggcattgaagccggattccgcaatgagcgacgccaaaatgagcactgccgtgctcacgcccgttgcaagcatgcggattgtcagctcgcgcatcgtcgtgcgcaggtcgtgcgccacgctctttgcgtctgccgggccggtgtaatcgtcgatgagctcgtcgctgttttcggcggcttccgtgttttcgggcgcttcgtccggcttttccgcaaagcgaattttaaagcggtgcgcaccggccgcactgacgttctcgtcgtcggaatacacgcgtgcttcgctcagcagtgcactttgcaaaacatccgcgttaatgatgtgcaccggcaagtcgcgctttctgtactgcgtcacgtccgttaccggcacggagatcttctgctgcgcaggctctgccgcttcttcgccggcgttctcggcgctttccgcagcctgcacattttccgctttcggcgcttgtgcttcgggcagctgctcgccggaagcaatgtccatgccttcttccgcctgcggctcttcctccggctccgggccattgcttgaaatatccttaaacgccatctcgggcgcgtcactttcttccgttttcggcgctgccgcagcctgctgctcggtattttgcacctgtgcagcctgctttgccgcgttttccgcctgcacagattccagaatgcggcgcacggaatcctcgcttacctccggcaccacctttgcctgctgcaaaccaaacgtctcattttcaaggtcaagcttaatctccatcgtgtgcgtctgcgcgtcctgcagcatcgccgtctggaaattctgcaccttgtccttcgtctttttgttttccggcaccacagcgttcgggtcattcatcgcaacggagaccggcaccggggccacaatgcccagctcgtcttccacagcggaaagatccacaccggccgtctctacggcctcggccacacgacggcgacgctctttctgcaggcgctcaaagtcctttgccacttcgtcgtcaagctccgcggtgttctcgtcaaacagcttgcggtatccctcgtcctgcgtggaaatctcacctgtggcatcaaacccgcgggtgtattcgtcaatcggttttaactggatgccgtagtacatgtcttcggcttcgttaaaaacctctttctgcttcttttcgcggcggcgcgcccaaaaaccttttttctctttcttctcttttttgttcttctttttctttccgggctcttcttcctcctcgtaggtatcccacggggagtcttcttgcacctccaccggctgcggttccgcttccggcgcgggctgtgctacctctgccgaggcttcctctacgggctgctccgtttcaggctccgtcacagcgtcgggttcttccgtcaccccgggcgttgttttttccgactcttccggcgcgccgttggctttcgccttgcgctccgcttccaatatctcgtccaccgagaatttgttctcatcgttcatggttttgggtcctttctttttcgcctcagcccttggccttgatgcccgcgcgctgccgcgcaatctcatagcaaagcacgccgcaggccaccgaagcgttcagcgaattgattctgcccttcatcggcagagaaacgataaaatccgatttttctttcacaagtctggacacgccgaagccttcggagccgacaacaagcgctgccgggccggagaaatcggtttggcaccaatccgtgccgtccatatccgcggcgtatacccaaacgccgcgcgctttgatctcctcaagaaataccgcaatattcgtcacacgcgccacggggacgtattccaccgcgcccgcagaagccttgccgaccgccgccgtaaggccaacgctgcggcgcttcgggataacaacgccgtgtgcgcccgcacattccgccgttctgaggatcgcgccgaggttatgcgggtccgcaatctcgtcgcacacaaggataaacggcggctcgtttcggctttccgccagcgcaaaaatatcctctacctcggagaacgcgtgcaccgccgccatagcgatgataccctggtggttttcgccgccgcacatgccgtccagcttacgggaatccacttcctttaccgggatgcccgcctgctttgccatgcggagaatggacgataccgaaccgtttttctccccgcgccgcacaaggatgctgtcgatgggtctgcccgctttaagcgcctccgtaacggcattgcgccctgctatgacatctctttctctctcgttttccatgaacaaacctattcctttccgcggcttcagaacacgtctgcggccgaaattcgcaatactatcgcagtatatagtagattataacatacttatatttgccattgcaaccgaaacgcgcaatttagcgcggtttttgcaggcggtttttgcgcctaaaaccgccgtgtttttgggcagttttttcgccgcgctcttttcgtcattttgacggtgcttttgcgtgttcattttgctcggcataattattcattcgggttgcatatcttctcacatcttgctgtatatgagctggcctttacatttatacaatctgtaatatgcacggcagaagtatacacacagcgagctttccacagcgttttccgtttaagctgtggaaaactctgtggaaagtgttaaaaacccgctttcggtgctctttttactttccacagcttttcacaatgtaaaatattatgtaaactattccgtcgaaaatgccgctttttaccgttttttcacagaatactcactataaaccgtgtgtaaaatttgcgtgaaaagccttgtgtttgcccgaaaaaatgtccctatatatggtgtttttgcgaaaaacagcgtttttattccaaattagaacgatttaggcgaaatcctaggcggcgagattttccgtttaagcacattttgtgaaaaaaagcaaggcggcaagctttacacggttgttttttcacctaaaatcgtgtaaaatgaaaatagcgagcagaaagacaccggaaagctgcgcactttttagacgtgtcccacaaaaaagcggggccgcacaaaccgtaagccacggcaattaaaacaaaagacatttttcggataaacatgcactgtatacaactataagaaaagaggaacccaaaatgcgtgaagacatttgctctataccgatcagtgaaattttcgagccgaaggacggctgcccgttctgccgcatgcgcgacatgctcgaggaccgcatggccacctacattaccggcgcggccatgatggagcccgacgtgcgcgtggaaacgaaccgcctcggcttctgccaccaacattttgagcagatcttacagcgcggcagccgcctgtccgtcgcccttattctcgaaagtctcttagacgaagccggcaaagagatcctgcccgaggacgacaagctcgcgccgaaaaaaattctcgccgccgcagatcgccgtgcgcacagctgctttgtctgcgaaaacgttgagaaaaacatgcagcacctcagcgccacggttatcaagctctggcagagtgagccggagttccgcacactgtacagcgagcagacgcacatctgcctgccgcattacagcttcattttggctgctgcgcagaaaatgccgcgtaaaaactttcagccgtttgcggcagaaaccaagcgccttgcgaaaaactatctcgataccgtcaaggccgacaccacccatttctgccgcatgttcgattaccgcaatgcgggcggcgactggggcaattcccgcgatgccattgagcgcgccatcacgtatctgacgagccgagagcccaccgtcaccaccaaaacggaaggcaaaaaccgttgatgcgcttcaccccgcccgatggcgttttaaacctcgcccaaacgctcgactgcgggcaatcgttccgcttttatcccgtcacgctcgaaaacaacattcccgcatggcgcggtgtggcattttcccgcgggctgaccgtctatcaagatgaaaataacgacctcgttttagactgcaccgcgcaggaatttcgtgacatttggtttgattatttcgattttaacacagattaccaaaagtcccgcgaagtgctttccgctctgcaccccgcgctgaaagaagccgccgaattcgcgggcggcatccgcattttaaagcaagagccgtttgaggcgctgtgctcgttcattatctcgcagaacaacaacattccgcgcatcaagggcattatagagcgcttgtgtctgcatttcggcgagccgtttctttatcataacgagacccgctacgcattcccgacaccgaaaaaattggcctcctgcacgccggaagacctcgctccgctgcgcgcgggctttcgcgcgaaatatctcattgatgccgcaaagcgcatcgcttccggcgagatcgatttggaagccgtgcgcaaaatgcctcttcccgatgccaaagcgaaattgcagacgatttcaggcgtcggcccaaaagtcgcagactgcgctttgctctacggtctgcaccgcacggagtgcttcccgatggacgtgtggatgaagcgcgccgtatcgcttttgccgagactttcccccgcagatttcagtgaaaacgccggcatcgcgcagcagtatttattccactatgtgcgcatgcaccccgagcttttcaaataaataattcgtccggaaccggcggcaggtcgtcgggtatcgccgccatacttctttttatgatcttcgccatttcttccggcgtttccgggcagccgtacaaaagccacttgcgcgtcacggcaaagtaccccgctttcacaaattcaaaatgatattccatgcagtgctcgctctcgatgccgagccgccgaaaaaaaggcttgaagacgttttcaaacagcgtctgatagcctttttccagttctgccgtgccgaatttctcaaaatacgcccggtaaaaagtcctgtcgcgctttgcctctcgcagcgtcgccgccacatatgcttcggagaagatattcgggtcgccgtgcatctcttcgtgtatccgctctacggactccgtccatttctcccctacgatcgctgttatcagcgcgggtatgtccgcatagtgcaggtaaaacgatgagcggttgatgcccgtcgcctcacaaatttcccgcacggaaatttgatttgtttttttattgagtaccattttcgtaaacgccttgcggatgcgccggtcggtctccgcaaagccgcattcgcccgcaaaagtcgaaaatcccctctaaaaatcaactgaattttcatattctgtccatgactttttccctcgcttctgttatactttaatatagaaaccaacgcagtataaggagacggtacgatgggcgcatttgtagaatttgaaaatgtatcgaaaatttataaaaccggcgacgtagaggtgcacgccttaaccgatgcaagctttgaaattcaaaagggcgaattctgcgttatcgtcggtgaatccggcgcgggaaaaacgacgcttttaaatattctcggcggcatggatacgctgtctaaaggcaccgtccgcatggacggacgcgacatcagccactttaaccgcacccagcttgaaaactatcgacgctatgacatcggctttgtcttccagttttataaccttatcccgaatttaacggcgctcgaaaacgtggaaattgcggcacagctgtgcaccgatgccatccccgccgaagacgtgctccgcgccgtcggtctccatgaccgcatgcagaactttcccgcacagctctcgggcggtgaacagcagcgtgtttccattgcccgcgcacttgccaaaaaaccgaagcttcttctgtgcgacgagcccaccggcgcactcgattacgagaccggcaaatctattttaaagcttttgcaggatacctgccgccgcgacggcatgaccgtcgtcatcatcacgcacaatgcggcgcttgccgccatggcagaccgcatcatccgcgtaaaaagcggccacatttactccgttcgcatgaacgagcacattacgcccgtggaacagattgaatggtaacgcgaagggagccggaaaacgcatgacaaaagcactcagaaaaaacacgcggcgcagcatttcgggcagccttgggcggcatatcgctatcctgctcatcattatgctgggtgtggcgtttctcacgggtctgcgagatacccgtcccatcatgtccgccaccgagaccgcctatgtgaaaaatacgaaactctacgatcttcgcctcatctccaccatcggctttgatgcggacgacgttgccgccgtgcagaaagccgacggtgtggttgccgccgcaggcagtgtgaatgccgatttcatctggcagcacgacaacaaagagcgcgtttaccgtgcacatatgctgacagataacatcaacgagcctgtgctcactgccggacgtatgcctgaaaacggcagtgagtgccttatagattccagtcgcttttcggaagacatgattggacaaacgatcgaaatttccgactccaacgacgaagatacgaagaaaaacttcaaatacagcacctacaccgtggtcggccttgcagattctccgctgtacatccacacgctgcgcggcaccacgtcgcttggcgacggcacgctgcagggcttcgttctcatcccggaggacggcttcgatttcgagtattacacagaattatacgttacctgcaccgatgaattcccgctatacagcgacgattacgacgattacatcgatacgttctccgatactgtcgaagccgccgccaccgcttccgtcaacgcgcgttttgaccgtctcacgtccgacggcaaagccgaaatttcagacgccgagaacgaactgaacgacaaaaaagccgaagccgaaacggagcttgccgacgccaaggcacagcttgacgatgcaaaagagaccctcacctccggcgaaacggagcttgccgacgcgaaaaagcaattggacgatgccaaagtacagttggatgcaggcgcagagcagattcagcccggcttcacttcgtgggaaagcgccctgcaaagcggctttgacgcatattacagcggcaagcagcaattagaggatgcccttgcggagagccaggcgcagatcgacgccggttacgcgcagctgcaggaaaacgaaaagctctacactgaaaaatatgccgaattcacgtccggcaaagagcagtatgaagtgggtcttgccgccgcaaaggacgcccgcacacaaattgatgccgcacgcgccgacttaaacgagaaaaaagcgcagctcacggcgggctttgccgcactcgacgaagcgcaggcgcagcttgatgccgtaaaagatatgctcgacccggcagaagccgaagcgcagcaaacggcgctcgatacgcagcgcgccgctttgaatcaaaatcagacgcagctcgacgatgccgaagccgtattaaacgaacaggatgccgccctcaccgcgcaggaagcgcagctcacagagaccggcaagcagctcgatgaagccgaaaccgctctcttgcaaatgcgcacgctgctcgatatcggccaaaacgattacaccgacggcatagcacaacttgaatatcagagaaaaacgcaaaccgcaaagcttgacgaagcgtataactcgctcatcacgtttcaaaacggcatcaaagaatacaacgagggtctcgcttcgtacaacgacggcgtaaaagagctcgccgacggcaaagctgaatacgaagacggccttaaagactacgaggacggcaaaaaggaatttgacgagcaaatctccgacgccgaacagaaaatcgccgacgccaaacaagagctcgccgatttaaagaagccggagctctacgttttaacgcgcgacgcaaacgccggctacgtctcatttgaaagcgactccaccatcgtcgaaaagctctcggggctcttccccattttcttcttcctcatcgcggcgctcgtctgctccaccaccatgacccgcatgatcgacgacgaacgcacacagatcggcacgctccgcgcgctcggatacaaccgcggctccatcctcgcaaaatacctgctctattccggaagcgccgccgcactcggctgtgtcatcggctattttgcgggcggctatgttttcccgttcgtcatctggacggcctacggcatgctgtatagcattccgggtttcgtcatactgtatgaccccgtgctgtttgtcatcgcgcttgcggcgtcacttttgtgctctgcgggcaccacatatttagccctgcgcatcgagatgcagaacatgcccgcaaacctcatccgcccgaagaccccggccgccggcaaacgcattttcctcgagcgcatcacgccgctgtggaagcgcctgaaattcctgcacaaggtctccctgcgcaacattttccgctttaaaaagcgcatgatcatgatgattctcggcattgcgggctgcaccgcgctggtgctcaccggcttcggtatccatgattccgtcgcgaacattgcaaacttccagtttgatgatattcaaaagtacgatgtcagcgcccagttctccgatacgctgaccgaagataaaatcaacgaagtcgaaagcgaccacaaatcggagcttgacgccgccaccgctgtgcagatgacctccggtgacgtcacaggcgacagcatcacaaaatccgcttacatcgtcgcgtccgacgaccccgccatcaccgacattttcgatctgcatatcgatggcgagaccgtaccctaccccggcaaaggcgaagtgctgctcaccgaaaaactcgccgagctcaccgatatcaaaaccggcgataccgtcaccgtttccgtttcggacacggaaaaagccgagctcaaggtcgcgggtttagttgaaaactacgtgcaaaattacctctacatgacgggcgaaacgtacgccatgatcgccgataagggctacgagccgaaaacgctcctgctgcgcgtaaacgacagcgcagacgaatatgcgctttccgctgcactctccaaaacggacggcgtatcctccgtttccgtcgtcaccgatacgcgcaatatgattgaccaaatgatgcagagcctaaactatgtcgttgcgctcgtgctcatttccgccggcgcactcgcgttcatcgtcctgtttaacctcggcaacatcaatctgaccgaacgcgtcagggaaattgccaccatcaaggtgctcggcttccattccagggaaaccggcgcgtatgtgttccgtgaaaatatcattttgtccatgatgggcatcgtcgtcggcctgccgctcggcgttctgctgcacacatttgtgctcatgcagatccgcgtcgatatggtctctttcaaagctgtcatcgcacccgtcagcttccttttgaccgttgtcatggtcgtgctgttcacggttatcaccgacctcgtcatgcgcaagaaaattaccaaaatcgacatggcggaatccttaaaatcgatcgaataaacaaaagctctgccgcaccccgttgccgcagagcttttgttgtgccataatccaaacgataaataaagttggtcgcgtttcgccggaattcaagaccgccacggacgacctgtgctgcttcatgagcctgattgcgaccatgctttttaaagacacccacactttcggcacgtttattcagacatggggcatgaacttcccgtgcgccgtgctgtggcaaatgttttactgtagcccgctcgtccgcctgatttttcgcttgattttcagggaaaagaaaagtaaataagcatagaaaaaattctccctcggctccgcagccaaaggagaattttctttatcccggcaaaatttccgccaaaatcgcgttggagaccaaaaagccttccgcggtcagcgaaattcgctcgtaatctgcatgtatcagatttttcggcaagtgcttacaaccttccagaaccccgtcaaacagcgcaccgccgttttcaaatcgtgtctcgcaaatctttctttgcagcccctcggtcagccgaagcgacagcatcgcaaactccgaaaaaccgccgcccgcgccgtcgtctgtgggcacattgccgtttaaaaagccctctaaatcgcgtgggaaataaaatcgcctgccctccataaaggagtgcgccgcgggaccgagtcccaaatattccccgcaccgccaatactgcaaattgtgtcggctctctttgcccggccgcgcaaaattgctgatctcatactgggcgtacccgtgctttttaagctcgtttacggcaaacaaatactggtctgccgtgccgtcttcatcgggcagattaagctcttgctttgcaaacggcgtaccgggctctatctttaaaatatacgcggaaacatggtcggcctcgagtgccgcgcaaaaatcgatcgagcttttcagtgtctccaagttcgagttcggcaggccgagcatcaaatcgaccgaaacattgtcgatgctcgcttctctcgccgcttccaccgcttcccgcacggtttccgccgtgtgcctgcggccgagaattttcaattccgcctcgtttgcggactgcatacccattgaaatacggttgaacccgccgcgtttcagcgtttcaaaaaatgaaacgtctacatccgccgggttgcactccgtcgtgatttccgcgttttcggcaacattaaactgctctttcactttttcgagcacgcggcacagtcttttcgcaccgaacacactcggcgtgccgccgccaaaatataccgtatgcagcagccgttcgccgtatttttcaccgtacactgcaagccgcgcacacagcgccgctaaatagcggtcaaatacgtcgtcttcttccggccgcgcggagtagaaatcgcaatacgggcacttgcttttgcaaaacggaatgtggatatacagcgaaaacggtttattcatcgagcttcagaaccgccataaacgcctcctgcggtacttctaccgtgcccagctggcgcatgcgcttcttgccttccttctgtttttccagcagcttctttttacgggtgatgtcaccgccgtagcacttcgccaaaacgtccttgcgcatcgctttaacggtctcacgcgcgatgatcttgccgccgatgcacgcctgcaccggcacctcaaacaactggcgcggaattttctccttcagcttttccaccatcttgcgggcgcgcgggtacgccttttccgcgtggatgataaatgaaagcgcgtccaccacttcgccgttcagcataatatccagcttcacaagctcgctcttgcggtagccgatgagctcatagtcaaacgacgcatagccgcgcgtgcgggatttcagcgcgtcgaagaaatcgtagataatttcattgagcggcagctcgtagtgaatatccacacggtcggtgtcaatgtatttcatatccttgaaaatgccgcgtctgtcctgacaaagctccatgatgttacccacaaattctgtcggggagtaaatgtgcgcgttcgcaatcggctcctccgccagtgcaatgtgcgagggatcagggtaattcgtcgggttatcgatggaaagctttgtgccgtccgtctttgtaatgtggtacacaacgctcggcgcggttgtgatgaggtcaaggttatattctctctccagacgctcctgaatgatctccatgtgcagcagtcccaaaaagccgcagcggaagccgaagccgagcgccacggaggtctccggctcaaacgtcagcgccgcgtcgttcagctgcaatttttcgagcgcatctctaaggtctgcatagtgtgcaccgtctgccgggtacacgccacagaaaaccatcggctgcaccgcacggtagccgggcagcggctctgccgccggtctgtccgccagcgtaatggtgtcgcccacgcgcgcctcgcgcacgtttttgatcgatgccgtaatgtagccgacttcgcccgcggaaaggctctttgcgggctccaaagacgtcgcgcgcagaatgccgcactccaccacggtgaactcactgcccaccgccatcatgcggatggtgtcaccggggtgcaccgtcccctctttaatacgcacatacgcgataacgccgcggtatgcgtcatagtaggagtcgaaaatcagtgcgcgcagcggcatgtccgggtcgccctgcggtgcgggaatatccgtcacgattttctccataacggctttgatgttgaggcccgttttcgcgctgatgcgcggcgcgtcctctgccggaataccgatgacgtcctcaatctccgccgcaaccttgtccgggtccgcggaaatcagatcgatcttgttcaataccggtacgacctcaaggcctgcgtccaccgcaaggtacgtgtttgcaagcgtctgcgcctcaatgccctgagaagcgtccaccaccagcaccgcgccctcacaggccgcaagtgagcgggaaacctcgtagttaaagtccacgtgacccggggtatcgataaggttgaacgtatatgcctcaccgtcgttcgcgcggtagacgagcgtcacagcatgcgccttgatggtgatgccgcgctcgcgctccagatccatgttgtcgaggatctggtcttccatgtcgcgcttcgcgaccgcctcggtctgctccaaaatgcggtcggcaagcgtgcttttgccgtggtcaatatgtgcaatgatgctgaaattgcgaattttactctgttccaagcgtgattctcctctttagaagtatacatagttaagtatagcattttcacggcgtttgcgcaatgactgcttttgaaaaagtccgcattttaaggtgcttcacaccttgcgcttttctgcctaaacgtggtatcatagaaaagacaaaaccacgcgtatacgtggttccataaggagaaccgatatgccgagattttttacatctgccgtgcagtttgacgaagccgcgtccgtaggctctgccgtcatagacggtgaagacggccgccacatcgcccgctccctgcgcatgcacacgggcgacgccctcacgctttcggacggtgccggcaccgactacacaggcgaaattgaaagcatcacgggcgataccgtcatggtgcgccttaccgataagtttaaaaacagaagcgagcccaccctgcgcgtcacgctgtaccccggtatgccgaaggccgataaactggagctcatcacgcaaaaagccgtggagctcggcgtcacgaagattgtgcccgttttgacttcccgcagcgtttcccggccggatgcaaaatccgtttcaaaaaaacaagagcgtttgcagcgcatcgcgcttgaagccgcaaagcagagcggccgcggcatcatcccagaaatcggtaaaatgaccgatttggagtccgcactcaaaaccgcacccggcaaaaagattttattctacgaaggcggaggcgaagcgctcggcacgctcgtctcccccgatgaggccgaagtttccgtcttcatcggcccggagggcggctttgacgctgccgaagtgcagctcgctaaacaatacggcgctacacccgccacgctcggcccacgcattttaagaacagaaaccgcaccgcttgcggcgctttccgttttaatgtacatcacggggaatatgcaatgaaaacagttttagtcaccggcgcgtcgggtgagatcggcgctgccatcgcaaaagaattcgccgccgcaggttacgccctcgcgctccacggcgcaaagcacattgaaaatgtaaatcaacttgccgaaactttcaaatcaaacggcatcgaagcctatcccgtctgcggcgacctttccgaccccgccgcatgcgagcgcgtgtgggcggacaccgaaaaaaaactcgggcatattgacgctctcgtcaacgccgccggcatctcgctcgttgattttttcgacaccatgacgcccgcacagtggaaaactttgtgtgacacgaatctgtcctctgccgtttacctctctcaatgcgcgtcccgctccatgatccgccaaaaatccggcgctatcgtcaatgtctcgtccatttggggcgtgagcggcgcggcaatggaagtcgcatattccgccgccaaggccggtatgctcgggctcacccgcgcactggccttggagctcgccccgtcgaacatcaccgtcaatgccgtcgcacccggctatatcgataccaaaatgaacgcccatttgtccgaagacgaaaaaaaagcgctgtgcgaggagattcccctcgggcgcgcaggcaccccggcagaggtcgccgcaggcgtcagatttttagccgaaagcccgtacatcaccggtgaaacgctcgtcatttcgggcggctggcgttaaggagaatatttaccatgtccaaacaaatcgatgcttattccttcgcactcggcgtgtgcgaggcattctgcgaggttgtccgtgccggcgtaaagcgcatcgcgctcagccacccgttcacagaagacgaacttcaaaacgtactcggcgcagattttctccccgcgtgtgaagcagttgcccgaaagtacggctgcaaagcgtattatttaaaagaaccgctcatcaccgaccttttcccggtctcgttgaacagcggcaagcaaaacgtcgttttctaccgcgaagaccgtgaccttaaagaattcttaagcatccaacacgataaacaaaccctcatcgccgaaaacaactatacgggcgaaaaccgccgccaaatcgccgtgcgttacgggcatctgctctcgtacagcgacgaagccatcgcccgctatttatcgcaaaatacagaactcgagtaatcaaaggagcacccctatgtccatgaccattaacaaagagctgccgaacccggcggccctcaaagccgaatttcccgtcccggagcacatcaaagaaatcaaagccgcgcgcgataaagagattgccgccgtgttccgcggagagtccgataaatttatcgtcatcgtcggcccctgctcggcggataacgaagaaagcgtctgcgaatacacccgccgccttgcccgtgtgaacgagcaggtgaaagaccgcctcattctgattccacgcatctacaccaataagccccgcaccacgggcgagggctacaagggtatgctgcaccagccggaccccgataaagcccctgacctgctcggcggcatcatcgccatccgcaaaatgcacatgcgcgccattgaggagaccggcctcacatgcgcagacgaaatgctgtaccccgaaaaccgcagctatttggatgaccttctgtcctacgaagccatcggcgcgcgctcggtcgagaaccagcagcaccgtctgactgcaagctctatggatatccccgccggcatgaaaaaccccacttccggagaccttgccgtcatgatgaactccatcaaagccgcccaaagcgcgcacaacttcatctaccgcgggtgcgatgtcaccaccaccggcaatccgctcgcccacgctattttgcgcggcggcgttgataaatacggcacaactatcccgaactaccactacgaggatttaaagcgtcttgcttccctctacgaaaaaagcgggctcgaaaatcccgcctgcgtcgtggatgtcaaccactcgaattccggcaaaaagttcaaagagcagatccgcatcgtcagcgaggtgctgcacagccgttcctacgaccccgccatacacaagctcgtcaagggcgtcatgattgaaagctacctcttcgagggcgcgcagaagatttgcccggagatgatccacggcaaatccatcacagacccctgcctcggctgggaagacaccgaaaagctgctttacagcatcgcggaaaaagcgtaaagggagttgtaagatgaaactgtacgtcacacgccacggcgaaacacccatgaacgctgcgcaccgcgtctgcggactcacgaatatcgacctcaccgaaaaaggcatcgcgcaggcaaaagaagccgggcgcagcctccaagataaaggcatcaagcgcatcatcgcctccccactcctgcgcgcccaacacaccgcaaggctcatcgcagacgagatcggcatagataccatcgagaccgaacagcagctcatcgagcaaaactatggtatctacgaaaataccgattgggacggcgaagcgttcaacgcaaataagcgcgagttcgccgtacgctaccccggcggtgagtccatgctggacttagccggtcggctctacccgcttttaaacaagctgaaagccgaaaacggccccaccacgctcctcgtctgccacggcggcatctgccgcatgatccgcacctacttcttagatgtcaaaaacaccgactacgccgccttcaagcttccaaactgcggcatcatggagtttgagctataaaaaaagcatctcggctatagacgggtgtccgtaaaacagttaatcctccgtatggcttagaccatgcggaggatttgtttatgtctaatcttccaacttgctggcggcaaacggtttgtcaaaaccgtttgcagacggcaagtccacaggggatagccgctttagcggcgcaagggggtgtagccaccttgacggaacgaagtgacgaaacattctcggtcgtgcagttttcttctgctgaccgggaatgaagctccgcaggacgcactactctcgatagagagtatagaagtgcgccctttagttcctaaagggattttatcagttcgccaaactggaattaaccagtttcttgtaacctttcgaatagttggctatcaattttataaattccttgataaggctgttcaatatagtatttaccactatcctcatacgcaaagatagtacttgttcctgtctcaaactggacgtcaattttgatataactttccacttgtggacagtcttgaacactttccttcttagtcggttcagaactggaaatatcggcgattatttcacttatccaagttttgtctgaatgacttactgtattttccccaaaagttatatcaatagatgtaatctcgtcggtttgaggtaacgtaataggagctaccttttttccacacgcaactaaagtcagcacacaagtaagacacaaaaacaaagaaagaaattttttcataagcatattacctccaacttccgatttgttgctcacttttcgtattcaaattataccataaaacttgtgaacagttctaccgcaactttggaatatatgagaaaagtccgaacagttttctgcccggacttcctcactcaatcgtaaatcaattcgattttcacaatttcctctgcctgtgccttgcaagcgttcatctgccgtacccattccatttggtgtcggctttcagtttctcggtcacgccgtttcgcttcgccagctccggcacgatcagctccatgcggtttcgtgccgcttcgtcaatcttagtgcaatactgtcttacgtacacccagctatgccgagatgctttttgctttacgcttccgtcgcagtgccatgctgcgggtcgtgctcgcgtttgatgcagcggtcaagccacttgcctcgcaaatagtaaataacgaagatcaccgccgtgatgacccatgataccgggtagttcatcgcgaccatctgcatcgtgtgccaatatggaaccataagcaatatccacacgacgcgcagaccgcatacgccgatgcaggtgatgagcatcggctgcaaagcctcgccggcaccgcgaatcgcgccggacaaaatctcgataaaaacaaacgtaaagtaagacggcgccaataccaaacagaactgcgcaccgatatttacaacctccgcatcgcccgtaaagaacatcaaaagctgatagcggaaaataaacagcagcgcagaaagcgcgatgatcgtgccaaggcacatgccaagccccacacgcgtgcagcgcttcatgcggtcatactggcgtgcgccgaagttctgcccggcaaatgtcgtcaccgcaatgccaaacgcgttcatcaccatccagataaagccgtcaatcttgccgatagccgcccaggccgcgatagccgtcgtgccaaagctgttgatactcgcctgaatgaggatattcgagaatgaatacatcacagactgcaagccggccggcaagccgatgcggaccacattctttagaatatccttgtgaaagcgaattttgcgcagctccacacggtatgcttcctgcgtgcccatcaggcggatcatcaaaagcacggcgctgatcagctgcgataaaaccgtcgcaaacgctacaccgaacacaccccagtgaaacaccaccacgaacaataaatcgagtaccacgtttgcaaggcagcacacaatcaaaacatacagcggcatgcggctgtcgccgatggcgcgcagaatacccgtgccgatattataaatcaggttgccgatgatgccgagataatacacgttcatgtacaaaaccgcgtcatccatgatgtcgtccggtacacccatcgcaagcattgtcgggcgcgccgtcacaatgccgatgaccataatgacaacgccgcccgccaccgccagcgccatggacgtgtggacagatttagaaagactttcgcggtcgtttgcgccgaaatattgcgaaatgatgaccgttgcgccggaagctacgccgacaaaaaagcctacaagcaggttgatgaccgtgcccgtcgtgcccacagccgccaacgcctcggtgccgacaaactgaccgacaatgatcgtgtcaaccgtgttatacaactgctgaaaaaaagtgccgatcaagatcggaaagaagaaaagcaaaagctgtttccaaataacaccttccgtgatcccgttttttattttttccaaacgttctccccctttgataccctataacgcctattcttaaaccgcgctctaaacacgcatacgcccattctaacaccttttctcccatttttcaagcggttacaaaaataaaagtacgaaataggattttaatttgacatcgtgggagatagccgcacccgtttcccggcgcgtatatttcaatcctaccgtacgcaaagcttttcgcgcgtggttcatcgaaaattccgccgccggaaagctgttcagtaaacggaacgacaaaggcagactttttagccactaaaaagcgcccgcagggtcaaaccttgcagacgctttcactttactcttctttactccacatacgtaacggggaatttcttctccttcacaggcgtttctgctgccgcataaccgatggccgcaatgccgaataccttgtggttctccggcacaccgaactccgtcaaaacggcgcgtacctcaggcacatcgcacgtgtcggaaagctggttgatccacaccgtaccaagccccatggaatgcgccgcgaggaagatattttcaagcgcgcaggcgttgtcccaggaagtgatacccgtgtcgccgatcagctcgttcgacggaatgataagcgcggcgggcttatacatgtcgtacttctcgttgccgagcgccttgcccacagccgccgtcagcttcgcgattttctcgcgatttaaaacagcagaaaaatgccatgtctggcggttcatcgcgctcggtgcatgcacagcgcactgcaaaagcgtgtcgatcttttctctctccaccgggcggtcgtcatacgcgcggacactgcagcgggtcaaaatgttctgaatcacttcattcgtcataaaaacgcttcctctctttgatttttcgggtatgtacccttatttttaagcggtcatccgcttattgattcaaaatttttccgccaaaagcgcggcgattttctctaaaaatgcctcatctcctgcggtaaagcgattttcaaacgggctgtccacatccaaaacagcatagacttttccgtctttcatcaccggcaccacaatctccgcacggctcgcgctgtcgcaggcaatatgccccgggaacgcgtgcacgtccgctacgcgcagcgttttcttctccgcaagcgctgtgccgcacacaccgcgccccgctttgatgcggatgcacgccggtttaccctgaaacggccccaacagcaaattgccgtccggctgcaccgtgtaaaagcccacccagttgatgtttttcagtgttagattcaacagtgccgaaaggtttgccatgttcggcacaagctccggctcgtcttcaatgagtgccttcgcctgcaaaacgacatcttcatacgtcccgctgccttgaagctcaaaactcattttttatactccttgtaaacaaagcgttgacttcatcgtgtgcattttcgcctttatacaacacattgtataccgcgcggcaaatcggcaaatcggccgaaaccatcttgccaaggcgcaaaagcgcgtccacggcgtaatagccctccgccaaatcggtgtacggctcgtttttcacaaacttctcgccgaacatgcggttgtgcgaatacggcgaaaacagcgtcgcttcgtagtcgccgaggtgacaaagcccgtaagccgaaagctcgttgccgcctaaagcgtcaatcaaccgcgcaatctcacgcgtgccgcgcgccatcaaagcgccttttaacgtcgaaagcccgaggccgtccagcataccggcagcaatgccgacgacattcttcgccgccgcaccgatctcattgccgatgaggtcctgtccgtagtaaaagcgaatgaggtcgctgccgaatgattccaccagcgtcttttttgcgtcttcgctgtcgctgtcaatgaccatgcagttcggcacaccggccgcaaactcctgtacatggccgggtccaacccaaacggcgaccgcgtttgagctgtcacactccgcggcacacacctgggaaagccgcatgccggtttcaatctccacgcctttcatgcacagcacgaaaattttatttttcagctcaaacggctgaagctcgcgcatcaggccgcgcaggccctgcgagttgacggagattacaatcacgtcgctgtctttcacagcgtccaaagaatttgtcaaatgtaaggtttcgggcagctctacaagcccgtttgtgcgggtctcgatgagcttttgcatatgggcagagcttttccgcccgtaaagggaaacactgtggccgatcttatcgaggtaccacgcgataaacgtgccccaacggccgcagccgataacggtaattttcatagggaatgctaaggtccttccaaaggggtaatgtaagcgcgaaattcaaatcacagctctgtaaataaatcttttgcgtctttggcgtaaatgatgccggaaacaacggcgagcaaggttgcaatcgccatcacgacaaaattcacccatgtaaatatcggagaaagcgtctccgtcggcaaagccaaaatgccgtatgcgccaaggtcgagaatatactgcgtcaacagcacgatgcagattgcgacgatctgcgacacggttttcgccttgccccagttgttcgccggaatcaccctgccctgctccaccgcaataaggcggatggacgtcacagcaaattcgcggaccataataaggagcacaaataccgtgtttgtcatgccgttcgccacaaagcagacaagcgccgacatcaccatgatcttatcggccaaggggtccatcagcttgccgaaatttgtgatgaggtgatcgcgccgcgcgattttgccgtccaagtggtcggtgtacgacgcaatgccgaaaattgccagcgccactaaattgtggtgcgggaatatgtcgccggaaagcagcatgaaaagcacaaaaaacggtactaagatgatgcgcagtatcgtcagtttattcggtaaattcatagcggttctcccgtttagacgcgcgtaccgaacaggtcgccgtcaatggcctcgtccacgtgcaccgttaccatttcaccgtagtacggcttcgtttccgcagagaaaaacaccttgccgtcaatgtccggcgcatccatggcgctgcggccgaaccagcattcggcgtagcggtcaaagccctccgtcaacacggtgatgtcccctccaacctgcttttcgccaaggcggtccataatattcatctgtgattccatgatgatctccgcgcggtgattcttcacctcgtcgtcgatctggtcgggcatcaaagccgccggcgtgccctcctcctgcgagtaggcaaagcagccgaggcgctcaaattcaatgtctttcacaaattccgcaagctcggtgaactcctcctccgtctcgcccgggaaacccgtaataagcgttgtgcgcagcgtcacgcccggaatcttctcgcggattttcttcatcagcgccgtcaggctctcacggtcgccggtgcggttcatgcgctttaaaacgcgtgcggaagcgtgctgcagcggcagatcgatatacttcacaatcttctcttcctccgccatcgtctccaaaagctcatccgtcaaagcgtccgggtaacaatagagcacgcgcagccacttgaggccgtcaattttgcacaggcggcgcatcagctttgcaagggaatattcgccgtacaggtcaatgccgtagcgggtcgtatcctgcgcaataaggatgagctccttcgcgccgttttcaacgagaccgcgcgcttcttcctcaatgctctccatcgtgcggctgcggtagccgccgcggatcatcggaatcgcgcagtaagtacatttgttgtcgcagccctctgcaatcttaatatacgcaaaataactcggggtcgaaagctcgcgctcgccgcacagcggcattttgctcttttcgggaaagctctccgtaaaatcattcattgcactttcaatacacgccgcaatgtccgcgttcgcgccgatgccgaacacaccgtccacctcgggcagctctttgtgaatttcctcgcggtagcgctccgcaagacatcccgtcaccacaatcttcttgatgcggccctcttttttcagcgtcgcaagctccagaatttcatcgatggattcctgcttcgcgctgtcgataaagccgcaggtattcacgattgcaacgtctgcaagcgcagcgtcatcgcacagctcaaagcccgcgtttttcaggttcgccatcagcatttcgccgtccacctggtttttggcacagccaaggctgaccattcccactttaattgccatgtatataaccctttctcggtgcatatccaagctttagacatgcccttatataatttctgttctgccgctacctattttagcagaaaacgagcggcttttcaatcgaaatgccgcccgttcacaaaaatcatactaaattaactttgagttttacaaatcttctctatttttaaactgtgattttaaactacaatgtattttatagccaaattaacgaattagggttaacatttattttaacataatatggaactaaaatacctgcctgttgtgcctgatacattgtattaacagccaccccggctactcctgtatagtcaccactggcataatcatatcgatcgctgacgtttaaagacgaatttgacaaactaatagttttagtataattaaaggcatggattgcataatacaagtcaagcaatgccgttgctgttccagactttggaaaaactcccgaccctgaagttgtactatccttccatatttgagctaataatggcgatccattacataaatacccatagcttggtgtataattggaattaatcgtggtattatttcttgcatgcgttaatagttctgctgataaataatatccctgagagttaaaatatgctactactgtcgaaactgaggctgacaagcttgcattacttctcgcagcataattggcagcaggataactctcctcagaatacgcaagataatcgttaataagcaattttgtcgttacaattagttcttctaattgttgaatttcttctactgaaccagcatcttctgccattttttcaaatcggtttatctgatcatacagttcctttacaacatcaaattctgatgttgtatcggcagcattgatttgatttgactctacaggttcaaactccgtatagatcgtttgcgcttctgcataagagaaaggttgaacaacgaaaaaagtagcaacaatgatagataatattcgaacagcttttctcataataacctccaaattactctcaaatcgttatctgcataacaaacattcggttttcaatacaatcaaaaaatatatataggctacttccatcatttttcaaaattttacgtttatacagattatttgaaaatgagggaaaaaataattttggaaccccaatttgatgaagattattttcaacctctttcactgagatttcaatattagaatctttaaaaaagcctatatcaacatctccatcaacttcaaacacagtataacgaattccatcgcccattgctatatctttagatcgtgcattatatatttcagttagctcaccaggtaattcaatattccaatattcttcatacctttcttgattagttttaccaaacccaaatatgggacttatttcaaataaaagagcaactattactaaacataagcaaaaaaagaaaacgcatactttttttgtcatattattctcccttctactatgttatagcgatattaaaaacatctgaaccaccttctcaagtatatttttcgcttaaaatatatcatgcaagagctaatttgtcaataactaaaattcacattgttattttttattgtttgttttgtataacacggccatcgcgcacggcactttgcccgggcaccagatgtattccgcatcggtatagcccgcgtccttaaagaactgctcataagagttcagcgtaaattcccgcttaaaatccgcgcccgtcttgtcgatggcattggtaatgccgttcgtttttccgtttttcttttcgttcatataagtcggtatgatgagcctgccgtcctttttgcacaccctgtccgtctcgcgcaacgcacaaaacggccctgcaaccaaagcagcgccgttttacggtcattcttctgaatttaagacagagaagatctcgtcaaagccgtagccgtagcgctgcaaggcggctacggcacggcggcgcactttttcgtcttcgcgcgccatgggatactttcgctccaaaatggcgcggatgttttcctctgtttccgaacgttctgtggaaaactcgtccatcaccgcggcgatgagcgcgtcgtcaatgcccttttggcgcagctcctgctttacgcggcgcgcgccgaattttttgcgtgtgaaaagctcgtttgcaaggcggcgggcgtagtcctcgtcatttagtaagcccagctcttccatgtgctccacggcgctgcgggcagcctcgcggtcaaattccgcgcgggtgatcttattttccagctcttttttggagtgggcgcggtgctccaaaaggtacagcgccttttcctcggcgcggtgctttgcggaggcctgcaaaagttcgtgcagctcctcatcgtcgagctcgtcgccgatggcaatgccgcggcgcaaaagcgtttccgtgtccaccttcaccgccgcttcgccgtcaatataaagctgtgaaagcctgtggcggcgcggggcgatgtccgtgatcttcattattcgtcgtcatcgaccgtgatgtcgatgtctgcctgcacgttcttacgggtgttctccgcctgctcgggggattcttcctcctcggccttttcaacgggcttcggcgcactgccgcccttgatggactttgcgtagagcttatccgcgttctgacggacgagctcggaaatttcctcaaaaatatccgggttgtcgcgcaggaagttcttcgcattgtcgcggccctgaccgatacgcgtaccgttatacgagaaccacgcgccgctcttctgcacgatctcgagcctttcggcaaggtcaagcaggtcgccgaccttcgagatgccctgcccgtacatgatgtcgaattcaacctcacggaacggcggcgcaaccttgtttttcacaaccttgacctttgtgcgggagccgatgatgtcggtaccgctcttcaaaacctccttcttgcgcacatcgagacgcacggaggagtagaatttcagcgcgcggccgcccggtgtgacctccgggttgccgtagacaacgccgactttttcgcgcagctggttgatgaaaatggcgacgcagtttgacttcgagatggcaccggcaagctttcttaacgcctgcgacatcaaacgcgcctgcaagccgacatggctgtcgcccatttcgccctcgatctccgcgcgcggaacgagcgccgccacggagtccacaacgataacatcgatggcgttggagcgcacgagcgcctcggtgatctcgagcgcctgttcgccggtatccggctgcgaaacgagcagagaatccacgtctacgccgagcgcggacgcatagaccgggtcaagtgcgtgctccacgtcgataaacgccgcgttgccgcccattttctggccttcggcgacgcagtggagcgccaaggtggtcttaccggaggattccggcccgtagatctcaatgattctgccgcgcggcagaccgccgataccgagcgcgaggtccagtgaaagagagccggtggagatcgcatccacgtgcatgccgttgttctggccgaggcgcataacagcgccctcgccgaactgctttttaatctgcgtcaacgcagtctcaagcgctttgcgcttgtcttcgggcttgatgtcctccacttttttgcttacggggcttttattttccttcgccatggttatatcctcacttcttttgaaatttgggttatggttcctgattgattgtgtttccgtcgagcgtggttaaagttttcgccaacctttttcaaaaggctgcggtttccaaaggtgaaactcttttttactgcctctattatactaaatccgtcgaaaaaaagcaacggttttctcgaacatattttcttttcttgctgaggtgagcaaaaaagcgacagttaagaggacatcacaggacatcggcggacatctttttgcgcaaaaagggcagaaccccggagaaaaccggaactctgccccttttttagcttatgtagaaattacagaccgagcagttcggttgccgctttctccatttttgcgatgatctcatcggactctgcggcggttttacccttgccggagaggtaaattttgatcttcggctctgtgccggacgggcggacgatgagcttgctgccgttctccagacgatactcgagcacgttggacttcggaagcgtaatctccgtcttctccgcgccctctgtgcgcacggaaagctgatagtcgctgtcgccgacgaccttgaagccggcaatttctgccggagcgttgtggcgcagatgatccatgatggaattcatcttcttcatgccgtcttcgccctcaaacgcgaagttgcacagggcgttcttgtagtagccatacttttcgtacagaacattgatggcatcgacgagtgtcatgcccttttctttgtagtaggaagccatttcgcagatgatcatgctgccgtccacggcgtccttatcgcgcacatagccgccggagaggtagccgtagctctcttcaaaaccgagcaggtagcgctccgggtggccttcgctctcaagcaaagcgatctggtcgccgatatacttgaagccggtgagggtacggcgaatttcaatgccgtaatccttcgcgatgccgttgaccatatcggtggaaacaatcgtcgtgaccgcgaccgggtccttcggcatggtgccgagctccgttttgcactgtgcaataaagttcaggagcagaatgcccacttcgttgccggtcatgagcacatactcgccgtgctggttgacggcgatgcctacgcggtcacagtccggatcggtcgcgagcagcaggtcgggctttacggtcttgcagagatcaaggcccttctggagtgcttcgcggatttccggattcgggtacgggcaggtggggaagttgccgtccggctcgctctgctccggcacaacggtgatgtccttcacgccgatgcggtcgaggatgcgcagcacgcacattttgccgctgccgttgagcggggtgtagacgagcttgaggttatccgccggcttaccgaggatgctcacgccgtaaaccgcgtcgatgaacgcgttgacggtctcttcgccaatatattccgccttgccggaagcgagcgcctcctcaaacgggattttcttcacgtccgcgaaaatatcgagcgcttcgatctccgccataatgccgtctgccatgccttccgttacctgacaaccgtcgttgccgtaggccttatagccgttgtactttgccgggttgtggcttgcggtaacgcagatgcctgcatcacagtgcaggtgacgcacagcgaaggacagcgccggggtcggcatgagttgcgggtagaggtacgccttgatgccgtttgcggcgagcaccgctgcggactctttggagaacagcacgcccttgttgcggctgtcgtgtgcaatggcaacggaaaggagcttaccctccgtgttgtgcttattcaggtagtttgcaaggccctgtgtcgccttgcgcaccgtgtagacgttcatgcgattcgtgcctgcgccaatgacaccgcgaaggccgccggtgccgaaggcaaggtctctgtaaaaacggtcgtttatctcctcgggctgatccttaacggaaagcagctcttctttcaagtcgggatcgtccagttcgacgctaagccatctttcatactcggtcatactctattcttccttccatggtttaaattttcggcagtgcgaaaaaacgtatctgccttatgttaaatgcggatgacccgcacctacacgctataattagattaccattttatctgtgcaatgtcaatgacaaattgcgtcgctccatgtcaatttatgtgtaaaatatttgttagtatcccggcgggcgaaacatcaaccaacccacaggttgcgcgaaagcccgagcaggagccggggtttaagatatacagtccgtcgtcgtaggtctcgagcgcctcgtgcgtgtggccgaacagcaaaagattcgcacccgcttcccttgcggcgcacacaacggtatagagccctgatttcacatggtaaaggtgcccgtgtgtgcagaaaattttagcgccgtcaaggtctaaaatttcgcgtaccggcacgtctgcgcagccgaggtcacagttgccgcgcacggagtaaaatgcgatattcgggaacagggcgcgcatcatttgaaaatcgttttgcccgtcgccgagaaaaatgacggcatccacgtctctgtgcttttcgagcgtttcgcgcatatagagcggcatgccgtgggaatccgaaaaaaccagcagtttcatgaaaattctccttcttttgaatttaacgcagatgaggtctcattttttcgcgccgcgcataaactgtaaacggaagtttccctaaagggagggtttaccatgaacgaacgtgaaatacaatcgcttttggctttggcggtgaaacggctgcacaccacgccggaagcgctgcgcgccgccgccgaaaacggcgacctgcagaacattatgggcggtcaaaataacgcggcggcttcgcagctaaaccgcgttttaagcgacccggaggccgcgaaaaagctgctttccacacccgccgcgcagaaactgtttgaggctctcggcggcaaaaaatagaaaggaggtgagcggcggtggaagacctggccgcagccgtacaatccattttaaacgacccgcaaagcatggcgcagctgcagggcgtgatgaactcgcttggcatgaatccgccgcaagcccctgccccggcttcgccgccggtgcagcaaaaaccggcggccgccgcgccgctcaatttgctgaacactctaaacaacagcgatccgatgacggcgatgcttttgcgcgccgcgccgcttttggcaagcgcgaaccgcgaggatgactccacgcgattgcttgcggcgctgcgccctttgctcggcgaagcacggcagaaaaagctggatgaagcctcgaaaattttgaagctcttgcaccttttgccgcttttgaaagagagcggcgttttacagaatattctttgagaaaggcggggtaaaatgccgagtaacatgccggacgcacgcgccgtggaagaagccttgcgccgcgcgcgggaaatgcaggggcgctcggcgcatcacgcgccgcccccgccggaaaagtcaacggaggaatcgccgcagggaaatgcggaaacgtcaactgaaataccgaaggaatttcaggctgcgccgaatagacctctttctcctctcgatacgctgctaaaagacaaggagcgcacgcttttgcttgcactcctccttttgctttacaacgaaggcggcagtgcggagcttttgttcgcgctcttttatctgcttatctgatctgaccgtcgccgcggatgatgaatttgtaggaaacgagctcattcaagcccatggggcctctggcgtgcagcttctgcgtggagatgccgatctctgcgccgagcccaagctcgccgccatccgtgaagcgcgtggacgcgtttacatagaccgccgccgcatcgacctgtgccgtgaaccgctccgccgcacggaggttctcggtgacgatgcactcgctgtggccggtagaatactgcgcaatgtgcgcgatggccgcgtcaaggctgtctacgacgcgcacggctaagatataatcgaggtattccgttgcccagtccgcttcggtcgcgggtttggcttcgggcagaagttcgcatgtgcgcttatcgccgcgcagctctacgtttttctctttgagcttatttgagataacgggcagcgccgcttcggcaatgtccttgtgcaccaagatcgtttcgatggcgttgcagacggacgggcgggaggttttcgcgttgaaaatgatattcgccgccatttcgatgtctgcgtctttgtcaacatacacgtggcagttgccgacgccggtctcgatgaccggtaccttggcgttttccaccacggcgcggataagccctgcgccaccgcgcggaatgagcaaatcgaggtactccgtcatgcccatgagctccacgctggacgcgcgggaggtatcctgcacaagctgaacgctgtcacgcggaaggtcggcggattctatcgcattgcgcagaacctcggcgatggcattattggagcggaacgcttccttgccgccgcgcagaatgacggcactgcccgccataaggcacagcgcagccgcgtcgctcgtcacgttcggacgagcttcgtaaatgatgccgataacacccatcggcaccgtgattttttccactttaagccctttggggttcgtttcgccgcttaaaatgcggcccacggggtcgcgttgggcggatacgtcttctacgccctttgccatgccctcaatgcgggcaggcgtgagcgccaagcggtcgagcatagcttcgctcatgccgttttcttttgcggctttaaggtcttctttgttcgcggcaagaatttctgcctgacgcgcgcgcagggcagctgcggcggcgtttaatgccgtgcgcttattttcgcccgcggtgcgcagaacggcggcggcttttttggccgcagcacccattttttgaagttctgtcatacgcgttgtgttcctttctgtaaattacggcatgaacaccgtgccgatgtcctcgccgtcgaaaatgcggtagaggttctccggatcttcgccggagaggatatatgtcgggatatttgcacgccctgcaatctctgcggcgcgaattttcgttgccatgccgcctgtaccgcgtgcggagcctgccccgcccgccatggcacgcacctcgtcgtcgatcttctcgatgacgctgagacgctttgcgtcgggataggccttcgggtttttgtcgtatacgccgtcgatgtccgttaagatcatcagcacgtctgcgttgatgatgcttgcgacgatggcggaaagcgtatcgttatcgccgaaattgcggccctcgagctcatcgaccgcaacggtatcgttttcgttgacgatcggaatgacgttcatatcgagcagctcacggaatgtattttccacgttgcggcggctgatgggctgcgaggtaacatctgccgtgagcaagacctgcgcgacgttctgatgatattcgccgaagaatttatcgtaggcaaacatcagctcgcactggccgatggcggcaagcgcctgctttttggcggtgtcgtccgggcgctccggcagaccgagcttgcccatgcccacgccaatggcgccggacgtaacgagcacgatgcgacggccgccgttttgcaggtcgcacagcgtgcggcagagcttatcgatgcggcgcaggttcattttgccgttttcgtatgtcaaggttgaggtgccgattttcaccacaacggtttttactgtatttaaatccatgattttatttgttttcaccgcaaattcgcggcaaaaacgtcctttccctattctcttttctgctccattatacatggaaacagcgcaaaaagaaagcctttttgcaaaaactcaggcgttaaaaacgtctaagtcttcgccgtttacgaccttgcccgtgtagcccgcatcgcggatctcctgcaaaatgaggtcgctgcggcggcgcgtttcagcttcgacatcaatggcgttatcctgaatattcatgtggtaaatgcggtggtaggtgacgagcagcttcggctgcgcttttttcgcaacctcagctaagtccgtgctgagcgtatgcacctcgcggtgatatttctgccacttcggttcgcgcgcggcaatgccggcggcatactcgacctcgtgcagcagaatatcgcagtttttggccttttccgcgatgatgtcgagcggggcggtatcgccgctgatgacaacggtcttcccgtcttttgttgtgaacttatagccgtagctttcgagtgtgccgtggctgacggtgaacgcctccacggtaacacgctcgtcttcgtaaataacgcccggttcaatctccgtcgcttccaccttatagccgttttcgttcgcgcgctcaaagccgtgcaggcgaaaatcgatatcgaccgcataggcagagagcagatgctgcgccatatttcgaattcccttcgggccaaagacccccagcggtttttcccgttccagcacccacggggtgaaaatgaggtccgcaaacccggcggtatggtcggtatgcaaatgcgtacagaacgcggtatcgagcagatcgggtctaagggcatcttcgccgcggcggtacgcttccgctgcgcgtcttacgacgccgggtccgaaatcgacgaggtacgcatggccgtcgacaacgacggcggaagccgggccgctcgcccacgggcaggcgttcggtgttcccgtaccgagcaaaacaagtttcgttttcatgtttatcatgcctttctgatttagaaaacaaaaagggacaagcctcggcttgtcccccgttatcgaacttagtgtctgtcgtttctgtcgcggcgcggacggtctccgcgcgggcggtcgctgcgctcacggcgcggctgcttctccggcaggacgttctccggcacggcaccgtcaaggtcgatcagcgcttcgcggcgggagaggttcagtctgcccttatcgtcgatttcaagcaccttgactttcacgatatcgccgacattgacgacatccgtgacgttctccgtgcgcttgatgtcgagctgagagatatgcacaaggccttccttgcccggggcaatctccacaaacgcgccgaagtccatgattctcgtcacgcggccgctgtaataggagcccggctccgggtcgttgacgatggtatcgatgatgtccatagcgcggcggcacttttcaatgtctatgcccgcaacatagcagtggccgtcatcctcgatatcgatggtaacgtcgcactcggcgcagatcttctgaatgaccttgccgccggagccgatgacctcgcggatcttatcgaccggcacgatggtggacagcatcttcggtgcatacttggaaagctcgggacgcggctctgcgataaccggcagcataacttcgtccagaatgtaatttcttgctttgtgcgtctttgcaaacgcttccttgatgatctccggcgtgagaccgtgaatcttcaggtccatctgaatggcggtgatgcccttctttgtaccggcaaccttaaagtccatatcgccgaagaaatcctcaaggccctgaatatcgaccatggtcatccagcggctgccctcggtgatgaggccgcaggaaataccggcgaccggcgctttaatcggcacgcctgcgtccatcaatgccagcgtagagccgcagatggagccctgagacgtggaaccgttagaggaaagcacctcggaaaccagacggatggtgtacgggaactcctcgaccggcgggatgaccggcacaagtgcacgctctgccagtgcgccgtgaccgacttcacgtctgcccgggcctctggagggcttcgtctcgcctacggaataggacgggaagttgtagtggtggatgtagcgcttggactcttcgtcatcgatgccgtcaaggagctggttgtcacgcgtggagccgagcgttgcaacggtaagtacctgcgtctggccgcgggtgaacatgccggagccgtgtacgcgcggcagcagaccgacttctgcggcaagcggacggatctcatccatacctctgccgtcaacacgcttctgctcgtcgagcagccagcggcgcacgacaaacttctgcgtcaaatacatgcactcgtcgatctttgccgcctgatctgggtaaatttcgtcgaagtgctcgtgcactttttcgtaaacaggcttgagtctctcgtcgcgaacggtcttgtcgtccgtatcgagtgcggccttcacgtcatcaatggcgaaatcgcggatttcttcgaacatctccgggtccggcttattggacgggtaagagaacttctctttgccgatctccctctggatacccttgatgaactcgatgattttctggttttccgcatgacctgccataatgccgttgaacatatcctcgtcggacacttcgtttgcaccggcttcgatcattgcgatgcgctcatcggtggaagcgacggtaacagccatctgggagagctttctctgctctgccgtcgggttgatgatgaactcgccgtcgatgaggccgacggaaacgccgctgatggggccgtcccacggaatgtcggagatggacagcgcgacgctggtgccgacgagtgcggcaatctccggggagcaatccgggtcaacggacatgacggtgcagacgatggaaacatcgttgcgcatgtccttcgggaacagcgggcggatggggcggtcgatcatacggcagacaagaatcgccttatcggtcgggcgaccctcacgctttaagaaagagcccgggatcttgccgacggagtagagcttttcctcgaagtcaacggaaagcgggaaaaagtcgatgccgtcacgcggctttgcggcagcggtggctgccacgtggatggtggtctcaccgtaacggacaaggcactcgccgtttgcaagctgtgccattttaccggtttcgatcttcagcgggcgtccggcaaattccgtttcaaatactctgaaattttcaaacataaaggttattttccttccccccgaaagccgggattttccgactccgcagaccgtttaacaattaaaccgacgcacacgtgttttacgacctgtatgcgcccgtttcactgctaaacagcccttggaatcattttgtgcagatattaaatcagctgcgcgggtcgcgcgcagctgaaaaaaggcaaaaaattacttacggataccgagttctgcaatgattgctctgtaacgctcgatgtcaaccttaatgaggtaattgagaaggcttcttctctggccgaccatcttcagcaggccgcggcgggagtgatgatccttctggttggtacggaggtgctcggtgaggtcgttgatcctcttggtgagaacggcgatctgaacttccggggaacccgtgtcaccctcatggcgtgcgtacttcttgatgatctctgtcttttcgctcttcagcattgtgttttccaccttttctaaaatatttgccgcgctcacaggtctgggtcggtgttatccctgcggagatgtctcccaaaagggttagtccctgatccgaggacgggcactttgaaagtatagcataattcttcaaagtttgcaagcggtttttcctctgcggcgcagatttttcgttccgtgcaaaatagcgaaaacgtccggcccaaaaccgactttttcacagctcttcctgccttttttgcgaaactcgtacattttcgacattgtgcatcttgacaagcttttgaaatccgtatactattaaacagttaattatcgaaacgaccgtgcaaaagcaagtttacccgtgaaaggctgaacacaaacgatgcgaaaaggcgttatgggcgcggaagtttttccgccggagaaaggatatttttaatgagcaaaattgcagttgttaccgatacaaacagcggcatcacccgcgaggaagcgaaaaagctgggcgtttatcttctgcccatgccgttcatcgtagacggcacggagtattttgagggcgtcacctgcacgtatgagcacttctttgaaatgctggaagccggcgcagaggtctccacctctcagccctcgccggaatccctcacggcgatgtgggaggaggcgctcgcgacgcacgattccgttgtgcacattccgatgtcttcggcgctgagcggctcttgcgacactgcaaaggcactcgccgcggaatacaacggccgcgtatgcgttgtggacaacaagcgcatttccatcacgcagcgcgaatccgttctggacgcgctgacgctggccgaaaagggtctgaccgctgccgaaatctgcgtgcagcttgaaaacaccgcgtataacgcgagcatttaccttgctgtaaatacactggagctcttaaaaaagagcggccgtgtgacgccggccggggcggcgctcgcgacgctgctgggcctcaagcccgttttgcagattcagggcggcaagctggacgcttacgcgaaggtgcgcggcatggcaaacgccgaaaaaacgatgctgaaggcgctcgaaaaagacctgcaaacgcgttttgcgggcaaaaaggtgcacattgcggcggcgtactccggcgacatcaagcccgcgctcgagtggcgcaagacaatacgcaagtattttgatgacaacagcattgagctttacaaactccccatcagcatttgctgccacgtcagctccggcgtaaaagcgctcggctgctttgaatattttgagtgatttttgcgtttacatacaaaaccctcgctgtgttcgtttgaagcacagcgagggttttcttatttatgttcaagcatttcaatgcttgcggcacggttatggaggctgccaagcaagcctttgaggcttaaaatgcggaaaagcagctgttcgcgctcggtgagcggcgtttgaaacgcggctttgacgtcttcggtcgttttgccgcagtaccgctcgaacgcttccggcgtgatacccagcatttcaatgagggcgtcgatgtcgtcaacgacggtttttacatcggcgtttttgccgctctgcgccaaagagaggtactccatgagccaatcgaaatacatggttccctttatgctgcccgacgcggcttccaaaagcgcatcgagcgtttcggcatcgcaatgcgtgacggttttgaatgtttcaaacccgagtcctgttttttcgcggcaggttttttcccattctttcatgtcgattggggtgagcatatttttacctctctttcttttgatgtgtcaattataacatatactttcaaaaaagtaaatatctattgacaattatttcatattatgctatattattggtgaaagaaattcacacaactctttcacaaataaatattattaaaggagtgtttttaatgttcaaaaccagaaaaaaggcaatttcactattactagtattttccttaatcttttcttctttgattttctgcaccccttatgcttccgcaaaaaacgcggacgaactaggaactgaacttaatccttacgtcttgtcacccggtgaaaaaattactgtaaccatcgacggctctaaagattctgatatatctacattagctgatgaaactttcccgagctgtattcttacaacctggtatgatggtacatattttcattggtctgtaaagcccatgtttactggtgcaaattttagtggaagcacaaatgtaatgagaaatggaattttccaaggagaggtttattttagcggattctctggacaaagaagggtgtataaagatgaaatgatacgattaagtggtacattaactcaacattttttggaacctactcatatacttcggtgttactacattcaaggctaactacacagtaaaaagaaggaagttctcacatgagaacttccttctttttacttcttttcaaacgcttcaaacagcgttcttgcggttttttcgttcaggctgatctccgctttcagcgcgtctaaatcgggaaactttttttcgtccctgacaaagctcaaaagctccagacgcagtgttctgccgtacaggtcgccgcctgtgaaatcaggcatccaggtttcagaaagcgcgtggtcggagccgacggtgggctttacgccgacattcgtcacgccgcagtaggttttgccgtccacatacacggcggaggcgtacacgccgaagcgcggcagcacgaagcgcggcgggaaattctggttaatggtcggcgtgccgatggtatgaccgatgtggttgccgtgcacgacctcaaagcagaagccgaacggtctgcccagcatggcggtgacgtcttccatctcgccgttttcaatcgctttacggatgcgcgtggcgctgacccgctcgcctttatattccactgtgggcacgacgtgcatttcgccgccgtgggcttcgcagagctttttcagccactccgtgtcgcccgccgcgaacttaccgaaacggaaatccgcgccacaggcgatgcgcttcacgttcaaaccgaagcgcagaaggtttgaaaagcgctccgcgggccactctgcgacctgtgcaaaatccggcatgatgacatactccacgccccagctttccaaaatgcgcatgcgctcctcaacggtggtgagatagcagcaggtgcctgtaaggtactccgcaggattatcccgaaacgtgaaaacaacgggtgtgagtccgctttccaccgccgtgcgaatgaccttatagtgcccgatatgcaggccgtcaaacgcgccgagcgcgaccgccgtttttttctcgccgatgaactttcgtatttcttccgtattgcgaatgacgtgcatgtgccgattccctctcatttttttgaaaatgacttaacgtatttgaattctccgttttccgcgcgagcaagtcccaagaacttctcgccgtcttcgtacagcgcgacctgcgtgccctccggcatggcgatcttcggtgcacggcagcgcgaaattgtgagtgcaccgccgtttaaatatctttgtgcctgcgccggtgtgacagacacggcagtgagcatcgaaaagagcttttccacggggcgaagaatttcatcaaagctttccccgttttctttcatcgcctttaatgtatcaagcgagacggcgtctgcgagcgtaaagccgcacgctgctgttcttctgagcgccgtcatggcaccgaccgtgccgcatttttgggcaatgtcttcgatcagcgtgcggatatacgtgcctttcgagcacgtgacgtgcagcttgccggttttttcattctcgttatattcgagcagcgtgagctccgcaatatgtacgggccgcgcttcgcgctctatttcgatgccctgccgcgcgagcttatataatctctgtccgttgacggagacagcggaatacataggcggcacctgtaaaatatcgccgcgaaaagaatccagtgcagtttcgagcgcagctcttaaaacgggggtttcatccgttttgatgacttcgccggtcacgtcgccggtggtatacgcttcgccaaaccgaaaagacgcttcgtaggtctttgcggtttccggcagaagcgacacggcttttgtagcgcggccgagcaaaagcggcagaacgcctgttgccatggggtctaatgtgcccgtgtggccgatgcgcctttcgcgcgtcaacccgcgcacgaccgccacggcgtcaaacgacgtgaagtcctgcggtttatccaaaacgatgatgccttccatgctgcctccgtattaccagcccgcctcttccacgaatttgtagaagtccttttccgcgtctttgtcttctgcgcggatggtgccgacggtctcggtataaatgatgtattcctcttcgccgtccaaatcaaacagcgtatcgcacaaattctggtcgtatgcgccgataccgcaggtgccgagatttaaagcactgcacgcaagatacaggttttcgcccacgtggcccatatcaacaagggaacctctgtggctgaaaatgccgtatcgccactcagtgcggtacggaacgaacgaccaatagaacacaacgctcgactttttcacccagtgctgatcgcacagggacttgtcgatgacgtcttcgatgttttccacctcaccgagatactcgagctgattttcgagcggcagatagtggtatttgccgggctttaagccctctacacggcgcacgagcaggtatgtttcaaacggatgtcttgcgccgccgcacggcacggtacgcagcgttgcatactttttgccgcggataccctttacgccctgcgttgcccaaagcaaaaacgaaagctccaaaagggacaggttctcttccgtataaacgcgggaggagcagcggttgaaaatgacatttaagaggtctttttcgaggccaagcggcttaaaatcgcgcggcagatcgatacgcgcatcgctcaccggcgctttcgtcagcggcggctgcggcagcattttctgctggtcggtcttgtagccctccggctcgtcacttgcatcttgctttaaaaagccacgtcggctttctgtgatggcgcgaatttcttcgggtgttaattctttcatgtgaactcctcccacctgatttacagctgaattaaattgccgattttcacttattttcgagcgctttgatggcttcgccgcaggcagctaccacgcgcgcttttacgtcttcaagctcgcccgtaagggagcagcctgccgcacctttgtgcccaccgccgccgaattcggcgcagacgacggacgcgtccgcggggttcgtggcacgcatggagaccttccaaacgcccccttcgcgctcgcgcagcgtaaagcccagcagaactccctccacctggcgcaccatggcggaaacgccgtcgagatcgtcttcggaagcgccggtctctgcgatgacgtcattcgtcaggcaaaacaccgcgcacttaccgtcacagtggaactccatgtcaccgtacaggcgtttcagcagcgctacggcagcgcggcttttggtatcaaacatcaggcggttgatctccgcggcgttcgcaccgtgctccaaaaggttcgccgcgatgcggtacgtgtttgcggaagcgttcgggtagcggaagcagcccgtatcggtggaaatgcccgtataaaggcagtccgcgatcttcggcgtgatctccgcgccgagcgccggaatcaaacgcgcgatgagctcgcatgccgcgcctgcggtgccttctacccacgtttctttggcaaacggacggcaggacgcgtggtggtcgatggcaaaatccgttttgtcgccgtagggctccaaagagccgagcagcgttttatcggccacatcaaccgtcacgatatgctccggctcgaactcgccgtattcgatgccctcaaaaaggtatgtgaatttcggcggcacggggtctgcacagcggaacatgaccgatttgccgagcgcgatgagtgcgcggctgagcgccgaagcgcagccgagcgtatcgccgtccggcgagcggtggctgaggatcaaaattttgtctgcgccgcgcaggaaatgtgcggcatcctccagatttgccataagcgtgaccaagctttcgggcgaaaatcacacccaaaagcactcctttctttgaatctttacgggaagcttattttttctcgttttcaaggtcgtgcagaatgcgcgaaatgttggcgctgtactcaatggaatccgtcgccttaaagatcatttccggcacatggcgcagctttaagcggtttccgagctcgcggcgtacatagcccgcggcgcttttaagacccttaacggcattttccgccgtctccatgccctccatggcgctgacatacactgtgcagtaggaaaggtcgtttgtgacctccacacgcaccacactcagcatgcagccgctgacgcgcggatccttgagttctcttaaaatagcggaaacctcacggcggatatcctccgtggttctgcccaatttataactcggcatcgtttattctcctttctcttccggcaggaagcgcgcggaaatgagctccgctgcaactttaaagcccgccttcagactttctgtttcgatccactcgccgcgtgtgtgctcaccggcgccgatgcaaagaccgattgccgcggcaggaatgccgtttgcaagcgggatgttgcagtctgtggagccggcatatacgcccgggcgcgtaccgaaatggttttccaccgcgtctgcgcactgtgttaaaagtgcggtctgacgcgggtcgtgattttctttgttgccgcaggggcgctcgccgagcagctctgccgtgacgtctacgccctttgctttaaattcttccagtattttctcaaaatatgccttggcatccataaggcaagcgtaatcgtccgagcgcatttcgtacagcatttccgcctgtgccgcgatgctgttgacggtcgtgccgcccgagatcgtaccgacattgaatgtcgttttcgcgctgcctgcgggaactttgtattgatagagctccgtgatgatggcagaaaggcgctcaatggcgtttacgtttccgaaatcgacaaacgagtgaccgcccgtggtcttcactgtgaccttgtagcgcagagagccgaccgccatgccgacgatgccgtcaaggtaaccgtcaaacgaaatgacctgctctatgcgcttgccgtaccgtgcgtttaaagcgcggctgccttttaagttaccgagaccctcctcgcacgagttcatgacaaatacaatgccgccgttcgttttcggcttttcgtttgcgacataagccgccataagcataagcaaagcgacgttcgcggtgtcgtcacccacagcggggcagaaccacttgccgtccttttcggtcagttcaaggggcacagactccgggaaaaccgtatcgatatgcgccatgaaaattgcgacgggcacatcgttttcggcgttatattcgtaaatgacgtttttcgcttcatcgataaaagcattttccgcgccgtggtccataagccacgctttgcagaatgcggcacgcttttcttcgtggtggctcggcgacgggattaagcacagcgtgcgcaaaagctccagcgccgtttggtgattcgcgagaacgtattcgttcaaattcatagggaatgcctttctaaagcaaagccgcgtcccgcgatggggacgcggctgaaccgacttttagtctctgtactcttccatttcgtaggcttcgaggatgtcgcccagcttgatgtcgctgaagcgctccagcgtgatgccgcagtcgtagccgtcctgcacttccttcacgtcgtccttgaagcggcgcagggaagcaatcttatcatcggcaacgatgatgccgtcacgcacaaggcgcacctgcgcgccgcgcacgatcttaccggaagtgacgtgaccgccgatgaccatgccgacattcgtgatcttgtagacctcgcggcactctgccttgccaaggaacacttcgcggtacttcggtgcgagcatgcccttcatagcggattcgatctcttcgatgcagtcataaatgatacggtagaggcgcatatcgacaccgtcgcgctttgcattttcctccgcgaccgggtccgggcggacattgaagccgacgatgatggcgttcgaggcgtttgccagcatgacgtcgctttcgctgattgcaccgaccgcgccgtgaatgacatgcacgcgcacttcgtcgttggagagcttctcgagggactgacgaacagcttcaacagagccctgcacgtcggccttgacgatgaccttgagttccttcatctcgccttccttcatctgctcgaagaggttatccagcgtaacctttgtctgggagttgaacatctcttccttctgctcggtaagacgctgctcaacgagctcacgtgccagacgctcgtcggaaacggcgttaaacgtatcgccgccgaccggcacttcgttgagacccgtgacctcaaccggcacggacgggcctgcgctctttacgcgctcgccacgctcgttcatcatggcgcgaatacggccgaccgtggtacctgcgaccacgatgtcgccggtatgcagcgtaccgttctgcacgaggacggtcgcaaccgggccgcggcccttatcgaggcgcgcctcaatgacggtgccctttgcggcacggtccgggttcgccttgagctccttcatttccgcaacgagcagaatcatttcaaggagatcatcgatacccattttggtgtgtgcggaaaccgggatgcacggcacgtcgccgccccactcttccggcacgagctcgtattcggtgagctgctgcttgacgagatccgggtttgcggccggtttatccattttgttgatggcaacgatgatggaaacgcccgctgccttagcgtggttgatggcttctaccgtctgcggcatgatgccgtcatcagctgcgacgaccagcacggcgatatccgtaaccatggcgcctcttgcacgcatggtggtgaaggcggcgtgacccggcgtatcaaggaacgtaatgtccttgccgtcgatattgacgcggtatgcgccgatgtgctgcgtgatgccgccggcttcgcccgcggtaacgtttgcgtggcggatggcgtccagaatggaggtcttgccgtggtcaacgtggcccatgacaacgacgaccggtgcgcgcggcacaaggtttgcatcgtcgtcttcgctgtcgtcaatgatgcggtcttcgatggtgacgacgacctctttttcaacctttgcgtggaactcatcggcaatgagtacggcggtatcaaaatcgatggtgtcgttgatggtagcgaaaacgccgtttgccatgagcttcttgatgacttcggcgctcgttgccttcaggcggagggcaaactcgccgacggtaatctcatccggcacggtgatggtgatggccttcgccttgcgttctgccgcgatgcggttgagtctttccgcttccgtctcgcgctttgcgctgcgcggcttgccgcggcgctggctcttctggttgatcttctgctttgcggcaacggtgtcgttcttcaccttgtcgtacgccagacggtcgtacttttcgttgtacttgtcgatgttgacgttgaccgttctggtatcgaccacgcggcggcgcggagcttcgcttgcggactcctgtgccggagtgttgttgctcggctggttgttctgcgcagaacgctgcggcttattctgctgtgcgttctggtttctgttattgccgttattgttgcggcgatcgttatttttgttgcgattattattgctattcacgttctgcttcttcggctcctgcgtgttcttagcggttttttcgctcggtttttccgctgttttctcggccggcttctcttcggtctttgccgcattgcgcgttgcaaagtacgcgtcaaagttctgtgcggcatgatcctgcgtgaagcggtcaaaaacgatatcgagctcgttttcttctaacgccgtcatgtgctttttcggctcttttacgtacttgccgaggatatccagcacttctttgttcggcacatccagatcctttgccacatcatgcactctgtatttaatcatcatatacgcatttcctctctttctccgtctgcgatgagctgcttcagtttttccgcaaatccgcggtcacacacggcaagcacaccggcctttttgccgatggctgcggaaatttcttccatgttaaacgcaggctccaaaacggatacatgatacttttccgcttcaaagcgcacgttcttcttcgttttgtccgaaaggtctgcggcaagaatcacaacgccgcacgcgccgctgcgcatggcttccacggcggtatcaaagccccagttgagctttcccgcacgtcttgcaaggcccaaagcggacagtgctctgttcatttttgcgcctcgcccgcctttcctttcacatctgtacacagctcctgatacatggcgtcatacacggcgtcttcaattttgcaggagaacgcgcgttcaaagcgccgcgccttctgtgcctttttcagacactcggggtccctgcaaacgtacgcgccgcggccgggcttgcggcctgtaaggtccaaagagacctcgccgcctgtctgcacaccgttctcatcttccttaacgggggcgcgcaccacgcgcaccagttcctttttcggcttcatttcaccgcatcccgcacacatacggagcggtattttcttttgtttcacgctgtatcacgttcctttctgcgagatgcaagtttcaaaagagcttacgcttcctcttcttcgccgaagaagccgctttccggcttaatgtcgatcttccagccggtcagcttggccgcaaggcgggcgttctggcccttgttgccgatggcgagggaaagctggctgtccggcacggtaaccttgcaaacgtgggaaccgtcctctgccgtttcaacggaaagcacggtcgccggtgcaagcgctgctgcaatgaactttgccgggtcttcactgtagtcgacaatgtccatcttctcgccgccaagctcgttgacgatgtcggaaacacgcgtgccgcgtgtaccgatgcaggcacccacagcgtctacgtccgggttatgggacataacggcgatcttcgttctggagccggcctcgcgggcaacggctttgatttctacggtgccgtcgaaaatttccggcacttccttttcaaacaggcggcggataagatccgggtgcgtgcgggagatgatggccttcgggcccttttcggtctccttaacgtctacaacgtagacctgtacgtggtcgccttccttgacgttttcggtgccgacctgctctcccttcggcaaaatggcttctgccttgccgatcttcagggacagcgcaccggtcttcgggtctacgcgctctacaagggcgctgacaagctcttgatggcgacccttgaattcctgcatcatctggtcgcgctcgctgtcacggatgccctgacggatgatgtttcttgcggtctgcgctgccacacggccaaactgttttgtatcgagacggtggcgcacaaaaccgccgatctccgcgcgcgggtcgtactgcttgacgatctcaagtgcaatctcgcggttcgggttttccacttcctctacaatctccttgcgcaggaacacgtcaaacttgccgctttccggatccatgtcgatgacaacgtcttcgttgccgtagctgttcttgcaggcggtggcaatggccttcttgatcttatcgatcatgaaatcgaccgggatgcctttttccgcttcgaggagcttcagagcctcaaacagctccttgccatcattgttcacttcttttttctgcgctgctttttttgccatttttcaaattacctgccttccggtattattctttcaaatttttgtattataaacgggagccttcccggatcagtcataatcttcgatgaggttgacgctggcacattcttttctggtgaacgtgaccgtggtgtcttcctcggtgatgacctcaaaatcgccgttttcggcaacgtcgatgaggatgccttcgagctcgcgcacgccgttttcaagcgggcgaatgagctttacgcgcaccggcgcttcaaggaaagcctcaaagtgctccgggcgggtgagcttgcggttgatgccgggcgaggagacctccaaggtatattcctgcggaatggggtcttcgctgtccagtaccgggttgatggcgtgggtgaggtctacgcagtcgtcgatgcctacgccgccttccttgtcaataaaaatgcgcagataccaatccgcgccctctttcgtgaacgtaacgtcccagattatgagcccaagctcctttgcgagcggctctgccagcgcgcgcacgatctccgtggtgctgcctttctttttctctgccatacgcagcttcctttctccgcccgcttttcggcggctgtgtctgttttggatatacaccctaatacaaacaaaagagcgggtcgccccactctttcatcatcctactatcttaccgtaaagattataccacagcgccgccttttttgcaaggagaaaaacaaagttttccgcacaaatacgggtgtgtttttacgttttggcgcggcatttttcacaggctgtttgcccctgccgcgcaaaacaacgtctgtgcgctttatttcccgaaaaacacaaaaaacggacgcgccacttttatgcggtcacgcccgtcgtttgtgttgttttattccgctgcggattcaagctcggaggtcgtgctctcttcctcatcgccctttacgggcttattctgcgcgataacttcctttgcttccagaatcttctggatatcgctcatgcgcacggagccggtcggctgatcgttcagcgtggcaacggcgcggcgttcggatgccgggtctgcgtagaacttaatctcctcgctctttctgccgtcgaagaaatcgtacttgattgtgaggatcgggtcaccctgcggttcctgaatctcctcgttcaaaacggaaacggcaagcagcatctggtagaacggctggtagtaatcgtagttgatttccttgccgtccttcgagacttccagatcgtagaatgtgttcgtctcggtggatttctcctcgttctcgatgcgggtcacgtcgtagacatccgtaccggtggacgaggtgagggtcacgcgggaaacgctcttgatgtacggcaggcgcacaaagccgtcgcgcagggaatacacttcaatattcacccaagaggtcacggcgctgtccgtgatggtgtagatcgttgtgtcgtcgtccaccatcatgctgtacaggtcgccggtcttatcgccgagcttaatgacatggtgctcatcgttcatcgtgtaatcgcacacagcgaccgggttatccagaccgtactttgcgatgtcttcttccgtagcgtgtacggcgaggacaccggcagccgtcacgttttgcagctgcttcacaaagtcgtcgatcttgccggagttcatgccggcgtagatcggctctgtgatgtcgtacgcgagcacttcgtcatcggaaagaccgaactgaatttcttccggatagttctgaccggaaaggtgcaggctgttgatttcgcttgtgctgtccgtctcggtgccgtccgtcgcagtgatggtcggcgtcggaattgcgatgagagacttattgaggaagtcgtacttagactgcttcaaatacgtggaaacgggcacgatgtacacttcgtcctcatacagcatgtaagagccggaggattcaccggctttattgccgatggtgaacgtctgggacgtgccgtccgtgtagttcatggtgatcttgtagccttcgccgctgccgaggccgtactcggagaggtcctctaccgcaccgaccttcttcgtcggcgtgatggagtataggcggtctgcaaggctctttacattcgagtagagcacgtcaaggtcgtcccagccttcaatggtgaaggtctgctcggtgtcgccgctcgaggtggtcgtttccgtcgggatgatcgtatagctgtcgtccgcggtgaggtcttcaatgccgatgttcttcacgtcttcggcggtcttatcgatcagtgcgggctccgtgctttcggaaactgtgctggaactgtttgcgtcgtcttcactgtccttcggagacgtgaggatcagcgctgcggcagccgcgcccagcacgatgagcacaacgagcgtgatgataatgtattttgtggttttcttcatggaaagcaggttcctttcttcgacttacagatgtcttcttctaaggaagatgacaaggccgatgataaggacggcaaccggcaccacaatggtgaacaggccaagaccgatggtctggatgaccgcggaggaagcgctgatatcaagtgtgttcgtttgggtctggttgacaacgaggcccacgcgggtatcggtcgtgccggtgaggttcttaatgaagtccagcgtatagtccttattgccgaaggtggagttgccgaggaaggtgccgaggtagcccatgaagttgccgtctaccacaacattcgcgcaaatcttgccttgattatccatgtagcgctgtgcaagaccggtgatggtgtaggtatcggtgttcgggttttcctcaacctcctgtgtggtcgtgaggtaagcggtgtcgctcgtctccaaaatggaatacgtagcgatgtcgttgttggaggtaaacaggcgctttaccggtgctgctgcggcggcgataacgttatcatacgtgccgctgagtacatcatcggtgacgtttgcaaaaagataagccgggaagcgtcctgcgtggtgagcacgttgttcatgtcgctctcgaacagcacaccggtctgtggctcaaggccccactctgcaaggaaggacttgaggttcggcatgtctgcccagctctgggtcgggtatgccgtgacatacaacgttctggaagaagccattttctcgtcaccaagataagcttcaagcttagaaagctcttcggacgtatagtccgtggtcggcgtgtcgagcacaacgatggaagcgtcttccggaatttcgtccgtcagcatgttgaactctttgacttcaaagttgttgtcgttgagcatgccggtaaacgtggaaaggttatcggaaacggtgagcatttcgttgtggcccgtcgcgaatgcgacgaccggaacggtatcgagattgacgaggtacagggcgtttgcaagtgcgccgtctaccttggagtagtagttatactggccggtggaagaatcctgctggatgctgaacaggtcggtaacggcgagcgtcttgtggcgcttatccgtcttgaccatgaccttaccggtcgtaagggagtcatcggcataatcgctgatgaactgcgggttcatgtccgggtcgatgtactcgactttgatcttgtcgttcagctcatgcagacggtctgcgaggttcgcgacctgactgtactttaagctgtaattggaatagacctcatcgccgcggatcgcgtcctcggagccgatgatgtaaatggtcgtttcgttgacgatctcctttgccacgtccgttgcttcatcgctcagggtattgaggccctctttcgtgaggtcgaagttcatggacggaaaacgcgtggtcagcgcagagaccagaacgttgatgacgataatcacggcgataaacacaaccgtgaacacaacggccaaagagccgtgcttgaatttttctttatgcaccgcggtctttactgcggaaaggttcggtttcttactcatctctatgctcctcccttagttccagcggcggctttccaccctgcgggcggtcaggaacacaaacacagccgccacgctgatgaagtacacgcagcttgaaacgctgaatatgccctgcgtgaaggtatcatatcgcgaggtgaacgagatccatgtgaggatggtgccgatgaagttgccggagagcgcagacgcaatctggtcgacgaacatcaggaaaacggcaatgacgaacgtgccgatagccgcgatgacctggctgatggtgaggccggaaatgaacacaccgatggagatcatagccgcgccgtacagcagcgtgccgatgtagttgccaaagagaatgccccacgggaacgcggaggagaaaaagcccatcgtgatggccggcagcagtgccagggtgttcgcgatgaaatacacgccgaacgccgcgaggaacttgcccataacgatgcccgtcacgctgaccggcgccgtgatgagcgcctggtcggtcttattcttgcggtcatcgctcatgctgcgcatcgtgatgatcggcataatcatcatgctgaacataaacatggtgctgaacacctgcgtgatgtacgagctggagccgatggccataacctgataatagaagaagccgtaaagcgcaagcagcgccgccacgacgacatagccgaccggggaagcgaagtacgctctcatctctcttttgaatattgctctcatttctctgcatcctccttcgtttcagcctcttcgggctcagatgcttcggtgttttcgggttctgtttccacttcaaccgcaggctctgccggagcagcgtgggaagcatcgccgcttgtaagctgcaggaagacttcctccagcgtgaggtctgtgtttctcaaagccagcagcggccagcccttgcgggtgagcagtgcaaacaggttgcggcgcaggtcgtagttcggctcgccctcgatggaaatctcgaagacgcccttttccttctcgccgagagagtaaacctccacaatgtgctccatgccgcggatggcctgcagaatttcgctttccgggccgtcaatgcgcgcaatgatgcggtgctctgcggaaaggtcgtgcgccaacgtatccgttgcgccgtccgccacaagacagccgttgttcatgacaatcacgcgctcgcacacggcctgcacttcgggcaggatgtgggaggacagaataatcgtgtggtttctgccgaggctcttgatgaggttgcggatctcgatgatctgcttcgggtcgaggccgacggtgggctcgtccagaatgagaacaggcgggttgccgagcagagcctgcgcaatgccgacacgctgcttgtagcccttagacaggttgccgatgagacgagtgtagacgttgtcaatcttcgtcagacggcagatctcgccgatatgctgcttgcggtcgagcttgacgcccttcagctcatacatgaagttgaggtactctttgaccgtcatatccatgtaaagcggcggcagctccggcaggtagccgatgagctttttcacttcgttcgggttttccagggtatttttaccctgtaccgtgaccgaaccgctcgtggcggaaaggtacccggtgatgatattcatggttgtggatttacctgcaccgttcggcccgaggaagccgacgatggtgccctcttcaaccgtgaagctgacattgttcagcgcggtatttgtaccgtagcgcttcgtgaggtttttgacctcgatcatgtttgatgaccatcctttctctgcgggacggaaatatgtacccgggaaattcccgtgcaaagtcctccccaatggcgcccgcgcagctgcgcgtcgctcgaaacggttttgaacatgcggtgaaccttttgtggaaaaagggagaccgcttccggaaccgtttagatcctctgttttgggtttccgcgcccctatgcagggcagcggaagcgcacaaattatcataccgcagttttcgccgttttgcaatagccatgccgtatttcgggcaaaaaattaagtcaacactgcataaagaacgtgctttgcgcagtgttgacttaacaaaacaaacgataactttagttatccgcattatagcggctttctgtgacggctatgtgaaaaaacaattcgcaagtatgaacaaaatgtgaactcctcacaaaccgtacactgtctgtacacacgcggtatttcaaaaaatcattcgccgcgcagcaatgcgatctcggcggggatgttctccgcgcggaacacggctgtgcctgccacggcaacgtctgcaccgttttcgcggcagatgggcgcggtttcacggttcacgccgccgtccacctctaagatgagctccgggcgctttgcacgcagcgcgcgcagcttctccatttgatcagccatgaacttctggccgccgaagcccggctccaccgtcatgacgagcaccatataaaggcggtcgaggtacgggtacaggcactcaacgggcgtgcccggctttaaagacaacgccggctttacgccgtacttttcaatttcggtaatggtttcatcaatgtcgtcgtcgcactccacatggaacgtgatgatctctgcgccggcctccgcaaactggcggatatactgcttcgggtgcgagatcatgaggtgcacgtcaaacgtaaggtcgcttaacggacgcagtgccttgacgacatccgggccaaagctgatgttcggcacgaaatgaccgtccataatatcgaggtgcagccaatcggccgcgctgacggactttgcgcactcgcccatgcgggtaaagtcgcttgcgagcatagaaggtgcaattttcatttttaccacttctttctacgagaagaaatttacggattttgcggttaaaagttatctttttcgtcgtccttttcctgcattttattcatggcggcttccgctttccagcctctgcggttcagaataaagaacacgattgccagcacaacgagaacgatgaacgtgagcacttttaatacggcgcccggtgtgccctgaaacactttccaatccgggaaaagcgaatccaaaagccaccacacgccaagcacaaggaaaaatccgcctgcaacgtagaatatcttattctctttcgacagacggaaaatcaagatcagtcctgcaataagccacatggcagcatatacataacccatggtatcctatcctttctaaagacatacgccttatcttctctttgttgacctgctttattatagcggatagtgctccaaaatacaaggaaatccgcagaaaatacacaaaatatcggaattctcacattttataaccgaaaatttttccttcttctccttttgcggagtaatgaagaatttacgctccccgcaaaacgcaaaaaggctgccggcaaaagccgacagccaatttcactgattatattgagatcagatcagctcaatgatcgccatctcagctgcgtcgccgcggcgcggcccgagcttcgtgatgcgggtgtagccgccgttacggtcagcatacttcggagcgatttccttgaacagcttgttcgtgacgctttccttggtgatgaaagccatgacgtttcttctgtttgcaagggtatcttccttcgcgattgtgatcatcttttcagcaagagcgcggacttcctgtgctcttgttgcagttgtctcgatctttccgttctcgaagaagaacgtaacgaggccgcgcagcatagccagtctatgtgcagtgtctcttccgagttttcttgttcccggcatgattgtcactcctatcgtttggtaatggtaattaaattattcatcgtccttgcggaggctgtagccgagctgcgcaagcttccagatgacttcttcaagcgacttgcggcccaggtttctgaccttcatcatgtcttcttcggactttgaaacaaggtcttccaccgtgttgatgccggcgcgctttaagcagttgaaggaacggacggaaaggtccagctcttcaatcgtcatcttgagcacctgtgcatcatcgctgccgctcttctctacgatggtatccatcgccttacccttttcggaaaggtcaacgaagaggttcagctggtctgtaaggatcttggcagcgagcgacaccgcctcttgtgcggtaataactccgtttgtccatacctcaagggtcagcttgtcgaaatcgatgcgctggcctacacgggcaggctctacgttaaagttaacctttaacaccggtgtgtaaatagaatcaactgccaattcaccgatcacgccctgcggcatattctgcttgttgcgttcaccggaaacatagccgcggccctcatcgagcacgatctccatgtacagctttgcgccttcaccaagcgttgcaatgtgcaggtccgggttcaggatctctacttcgctgtcgcacttgatggaatctgccgttacgatgcaggggccttcagcagaaatctccacggttttcgggccttcgcagtgcaacttggcaatgagacccttgatgttcagaacgatttcggtgacatcttccttaacacccggaatggtggagaactcgtgtacgacgccgtcgatcttgatcgacttcggggctacacccggcaggctggaaagaagcacacggcgcaggctgttgcccagcgtagtgccgaagccgcgctccagcggctctaccataaaccggccgtaagtgttatcgttggataattcctcggtctctattctcggtctttgtatcatctcaatcatttgcgatcctcctttacacatttgacgtaattcgtaaaacccataaaataatgttaagttttactggattacttggagtacaactcaacgatgagatgctcttctacctcaaattcaatgtcgctgcgctccggcatgcgaaggatcttgccctcaagggcttccttgttgcgctccatccactcgggagtggtgacgagcggtgcgtctgcgccggtgagcttggagaacttcacgctgctacggctagcttcacgcacagcaatgacgtcgcccggcttcacaaggtaagacggaatgttgaccttcttgccgttcacggtgaagtgaccgtggttgacaagctggcgtgcgtcgcggcgggtggaagcaaagccgagacggaacacgacgttatcgagacgacgctccagcagacgaagcaggttttcgcccgtcatgccggtctgacgctcagccatatcaaaatagcttgcaaactggtgctccagaacgccgtaaataaacttcagtttctgcttctccttgagctgagttgcatattcagactgctttctgcgcataccgttgcccggattgcggatggtggtcttcttgctgtaacccataacggccggagaaatgcccagcgctttgcagcgctttgcaatgggctgtctgttcttagccatattctgtaacctcctaatctgttatacgcgtcttctcttcggcgggcggcatccgttgtgcgggatcggcgttacgtctttgatcatgctgacctcaagacctgccgactgcagtgcacggatagcggcttcacggcctgcgcccgggcccttaacatagacttctacgctcttcatgccatgctccatagcaatcttagccgcggtctccgcagcggtctgtgctgcgaacggcgtggactttctggaaccacggaaaccgagttcgccggcgcttgcccaggataccgcattgccctgcgtatcagtgatggttacgatcgtgttgttgaaggtggactggatatgtgcagcgccacgctcaatattcttgcgctcacggcgtctgcggactgcggttactgctttctttccgccttttgtagctgccatttaaaatccctcccgattacttcttcttgttggccatggtctttctcggacccttgcgcgttcttgcgttggtcttagagcgctggcctcttaccggcaggcccttgcggtgacggacaccgcggtagcagccgatttcaacgagtctcttgatatcgaacgcaacattacggcggaggtcgccctcaacggtgtagtggtggtcgatatattctctcaactttgtagcgtcatcttcagaaagatctcttacgcggatgtccggatcaacgcccgtagcagcgcagatgtccgacgctgtcttgcggccgatgccgaagatgtaggtaagagcaatctcgattcttttgtctctgggtaaatcaataccagcaatacgagccatgcttattgcacctccataaatatttcagagcctcagccctggcgctgcttgtgcttcgggttttcacagatgaccatgactttacccttgcgcttgatgatcttgcatttttcacacatcttcttaacagaaggtctgactttcatttgtgtgccctccttatgcgttgtggggtcttcaaatctattttatcttacttggaacgccacgtaatgcgtccctttgtcagatcgtacgggctcatttccagtgtgaccttatcgcccggaaggatgcggatgaaattcatgcgcagcttgccggagatgtgagccaggatcatatgcccgcctgggatctctacctggaacgtcgcgttcggcagagcttcctttacgattccttctacttcaattacgtcctgctttgacattcttgtctcaccaatccttacatttaaatgttacgttgtgtgcgctctgtatgctgtgagcgccgtgcgtatttgtcgattggtcgaaaggctctcttcgctgagcaccgtcgccgtcggggctaaatgcatcagctttttctttttcggtgcttccatcctgcgacgtttgccgtctgccatgtaggcatacacgccgtccgttttcagcaccacctgaaaatcgcctttatcatgacctttaagcgaccgcataatctgtccgcgtacacagtccatctgacacctcaatccagtgatgtgagaatcacagggccgtcgggtgtaatggctatactgtgttcaaagtgggcggcaagcttgccgtccttcgtcacggtggtccagccgtctttgagaattttaacctcgcagctgccctgcgtgaccatgggctcgatcgcgatcgtcatgcccggtaacaggcgtacacccctgccgggggtgccgtaatttggaacactggggtcttcatgcagcttcgcacctacgccgtggccgacaaattcccgtaccaccgagtaattgcgagcttcgacatactgctgcactgcggagccgatatcgccgatgcggttgcccggcacagccttttcaatcgcaaggaacaggctctctcgggtcgcatccatcagcttctgtgcttcttcggaaactttgccgcacgggaaggtccatgcgttgtctccgttgaatccctcatagattgcgccaacgtcaatggaaacgatatcgccctctttgagaatttcgtgtgctgaaggtatgccgtggataaccacattatttaccgaaatgcaggcgctcgccggaaaaccgccataaccgagaaagctgggcacggcgcccgccttctcgattgttcttctgacgatcttgtccagttcgagtgtagaaacacccggacggaccgcttcaccggccttcagcaatgcttcctgcgaaatctttcccgcgtcacgcatataacgcagttcacgggtcgttttcaggttaatcatgcttacgcctctaatgctttgagtgtgagggcggtcgtatcggcgacctcctcctgaccttctacgatgtgcagcttgccctgcttctcgtagtattcctttaagggctcggtctgctcgtgatagacgcgcaggcggtccttaacggtatccgggtggtcatccttgcgctgaacaagggtgccgccgcagttcgtgcagacgccttccactgccggcttcttgtaaagcaggtggtaggaagagccgcacttttcgcagacacggcgtccggacattctcgtgacgatcttctcgtcgggcacttcgatatcgatgacccgatcgatcacaacgccggaagcgtccagagcctcggcctgcggaatggttctcgggaaaccgtcgaggataaaaccgtttttgcagtcttcctctgccagacggtccttgatgataccgatgacgatctcatccgggacaagctggccggcatccataaaggctttcgccttgaggcccatttccgtgccgcttttcagcgcctctctcagaatattgcccgtagaaatggcgggtattccgagatgtttgcagataacttctgcctgggtgcctttaccggcacccggtgcacctaaaaggatcagcttcattgttcatgactcctttcgtatcttatgcgcccgggggcttaatcaaggaagcccttgtagtgacgcatcatcatctgagattcgatctgctttacagtctccagcgcaacgccgaccatgatgatgacggacgtgccgcccatggaaaggccatacatgccggtgaggttgctgtaaaggatcggcaggatcgcaacgaacgcgaggaagatcgcgccgatgagcgttatcttggaaaggatcttgctgatgaactccgccgtcggacggcccggacggatgccggggatcgtaccgttattggtgcggaggttgttcgccatttcaatcgggttgtactggatcgtcatgtagaagtaagcaaacacaacgatgagcagcaggtacagaacactgtacagccagccggtggaggagaaggcattgaagaagcccttccagaagccggtcggttcgccgacaaagaggcgaatggtgctcggaatggagaggatcgcagacgcgaagatgaccggcataacaccgctcatggtcactttgatcggcaggaacgtgctctgaccgccgtaaacctttctgccaacgaccttcttagcatactgcaccggaatgcggcgctcggaatcgttcatgaaaacgatgacccaaatgaccgcgaggaaaaggatgatgaacagcggtgcaaagacaaagtacttaccgtagctctccggagactgcattgcagccgagaagtagctccagatctgacccatcgtaaccggaagacgtgcgacgataccggcaaacaagatgatggaaatgccgttgcctacgcccttctggttgatctgctcacccatccacatgatcagcgccgtgccggcggtgaacgtgagaacaataatgattgcagtaaatactgcggagaaaccttccttgtacagggtaatgttattgtttctcaggtagaaataataagcggtaccctgaatgaggccgagacccaccgtggtgtatctcgtaatggcagcaattttctttctgccttcttcgccttccttcgccatgcgctccaaggcgggaatcgccaccgtgaggagctgaatgatgatggaagagttgatgtacggggtgatacccattgcaaacagcgttgcatttgcgaacgcgccgcccgttaacatattgatataacccagtgcagtttcattggcgcttgccatcagcgtgttgagcgcggaaacgttcaggaacggtaccggcacaacagagccgaaacggaaagcaatgatgatcaaaagcgtatacaggagtttcttacggagatccgggatcctccaagcgtttttgagtgtattaaacacttagatcacctcggccttcccacctgcagcctcaattttcgccttggctgcttcggagaaagcgttagccttaacggtaacctttttggtcagcgcgccattggaaagaaccttaacaccgtcgcatgcagacttgatgatgcctgcttcaacgagtgctgcctgatcgacgactgcgccgtcttcaaaggcgttgagggcgttcaggttgatcgcaacgatctccttagcgaagatattgttgaaacctctcttcgggattcttctctgcagcggcatctgaccgccttcaaaaccggggcggaaaccgtggcccgctcttgccttctgacctttgtggcccttaccggctgttttaccgttgccggagccatgacctctgccgatgcgctttgcgtcctgcattgcgcccggggtagctctgagttcattgagcttcattcaaacacacctccttagcctttgataacctcgaccaaatgaatgatcttcttgattttgccctctgtttgtgcattatcgggctgagtggttgtatcgccgaccttatgcaggccgagcgcctcggcggttgcaatctggggctttttgcagccgatgaggctctttttcaacgtaatctttacgtctgccatattgcaaacctccttacagaatttcacttacggacttgccgcgaacagctgcaacctcttctgcggttctcagctcggagagaccggcgagagttgcgcgtacaacgttgcacgggttgttggaacgcagtgcctttgtacggatgtccttgatgccaacgctttcaacaacggcacgaaccgggccgcctgcgataacgccggtaccgggcgctgccggctttaagagaacacggcctgcgccgaattcgccgacgatctcgtgcgggatggtggagccgcgcagagcaaccttctgcaggttcttcttagcgtcttcaatgcccttgcggatcgcgtccggaacttcgccggacttgccgatgccaaagcctacgatgccgttgccgtcaccgacaacaacaagagcggcgaacttaaagatacggccgcctttaacggtcttggaaacgcggttgatagcaactacgcgctccttcagatcgagtgtggatgcgtcaattttcatagccaaaacaatattcctccttcttagaagttgaggccgccctcgcgggcgccgtcggccagctctttgacgcggccgtggaagatatagccgccgcggtcgaagaccacatcggtgatacccttttctgctgctctttctgcgatcagcttgcctactgcgtgtgctgcttctttgtttccgccgttgccggtaaacgccttctcaaccgaggatgctgcgcacagtgtaacaccgttcacatcatcgatgatctgagcgtaaatatgcatattggagcggaaaacatcgaggcgcggtctttccggtgtgccgctgatcttgccgcgaactctcttgtggcggcgcagtctggctacgttcttatctgccttactaaccatttttatctcactcctaacctattatttacccttaccggtcttgccttccttgcggcgaacaacctcatcaatgtacttgatgcccttgcccttgtacggctccggcggtctcttctcgcggacttccgctgcgaactggccgaccttctgcttgtcgataccattgatgatgatcttgttcggagccggaacttcgatcttgatctcgtccgtttccggaacgatgacctgatgcgagaaaccgaggttcataaccaggtttgtgccctgcttctgaacacggtagccaacaccgttgacttcgagctctttcttaaagccttccgttacacccacgatcatgttgtggataagggtacgggtgaggccgtgcagagaacggttctctttgtcgtcgttcggacgtgtaacaacaatctcagcgccctccacagcgatgttcatgctcggctggaacttctgagtcagcgtgcccttcgggcccttgaccgttacgcagctaccgtctaccttaacctcgacgcctgcgggaatatttatcggttttcttccaattctggacatgttattgcacctccctgattaccaaatgaacgcgagaacttcgccgccgatgttcatctttcttgcctcgcggtcggtcataacgcccttagaggtggagatgatggcggtgccgaggcccttcatgaccttcggcagctctgctgcgttggaatagatgcggagacccggcttagagactctcttgaggcccttgattgccggcacgccgccttcaacatacttcagtgttacggtgatgacgccctgtttgccgtcctcggtaaccgtaaagctcttgacataaccttcgtcaacaagaatctggcaaatagccttcttcatgttagaagcagggatgtcaacagtgtcatgcttcgcagactgagcgttgcggatacgggtaagcaggtcagcgattgtatctgtaatctgcatgatttattaacctcctataaagcttttaccagcttgctttcttaacacccgggatctggcccttataagccagctcacggaagcagatacggcagatgccgaacttgcgaaggtaggcatgcggcctgccacagatcttgcatctgttatattcgcgcgtagagaacttctgctctctctgctgcttgagtttcattgaagtcttggccacagtattccctccttacttttcaaacggagcgcccatgagcttcaggagctcgcggccctcttcatcggtatttgccgtcgtaacgaagcacacatccatgccgcggaccttgtcgatcttatcgtactcgatctcagggaagatgagctgctctttgatacccaggctgtaattgcctctgccgtcgaaggagttggggttgatgccgcggaagtcacgcacgcgcggaagcgctacgttgaacaggcggtccatgaactcccacatcttctcgccgcgcagcgttaccttaacgccgatcggcatgccttcacggagcttgaagtttgcaacggacttcttagctctgcaaacgatgggcttctggccggtgatcgtcgcgaggtcgccggaaatggaatcgatgaccttcgcgttgtcttttgcctcgccggcgccgacattgatcacaattttatcgagcttcgggatctgcataacgctcttgtagccgaacttcgtcatgagagcgggtgcgacctctgctttgtaaaaatcattcagtcttgccattttattccctccagattaaagcgactcgccgcattttttgcaaatgcgctcttttgtgccatcctcaagcactttgtgggtgacacgggtcggcttgccgcagcgggggcaaacaacctggaccttgcaggcgtagatcgcggactctgccttgatgatgccgccggcctcgcccatcttgcggggctttacgtgcttagagacaatgttggcattctctacgatgaccttgccctctttcggggaaacagccatgatcttgcccttcttgccgcggtctttaccgctgaggataacgacggtgtcaccggttttaacatgaactttactcatttcaggacacctccaattaaagaacttccggggcgagggacagaatcttcatgtattccttgtcgcgcagttcgcgagcgaccggcccgaagatacgtgtgcctctggggtttttatcatcacggatgatgacggctgcgttttcgtcgaaacgaatgtaggtgccgtcttcgcggcgaacgccggatgcggatcttacgataaccgccttaactacgtcgcccttcttaacaactccgccgggtgctgcttttttaacagatgctaccacgacgtcgccgatatttgcatacctccggcctgtaccaccgagaacgcggatgcacataagctccttcgctcctgtgttgtcggccaccttgaggtaagtctgctgctgaatcacagtaaattcctccttctgctaaagccgattatttggctttctcgataatctcaaccaggcgccatctcttatccttagagaggggacgagtttccataatacgcactctgtcgccgatgccgcagacgttctcttcgtcatgggcttttctcttaacggtacgcttgatgatcttgttgtaaagcggatgtctgtaactgtcctcaacagcaacaacgattgtcttatccatcttattgctgacgaccttgccgacagttgtctttctcatgtttctttcgctcacgtctaatcctcccttcccttatgcgttctctttgctaagctcattcgcacggataactgtcttaacacgagcgatgtccttcttaaccgccgagatgcgcatcgggttttcgagctggttaatagcgagctggaatctgaggttaaagagctcagccttgaggtcattcagttttgtgttcagctcttctgctgtgagctgtctgatttcagaagctttcattactcttagccctcctcttttgctacaaacttgcacttaatcggaagcttgttgcttgcaaggcgaagtgcctcacgtgcagtctcttccgaaacaccgccgagctcgaacataactctgccgggcttaacgacagctacccagtactccggggaacctttaccggaacccattcgggtttcagccggcttctgtgtgatcggcttgtccgggaaaattttgatccaaactttaccgaaacgcttgcagtaacgcgtcatagcaacacgggctgcttcgatctggttggaggtgatccatgcgggctcaagagcctgaaggccgaagtcgccgtatgtcaccttattgccgcgatatgccttaccggtcaggcgacctctgtgcactctgcggtatttaactctcttaggcagtaacattacgcacgtcctccttctctcttattgtttctgcgggtgttgttgctctcgttgagcacttcgcccttgtacagccaaaccttaacgccgatgcggccgtaggtggtagctgcttctgcaaagccgtaatcgatgtccgcacggatggtctgcagcggaatggtaccgtcatgatactgctcgcttcttgcgatttccgcaccgttcaaacggccggagcacatgattttgataccctttgcgccgagcttcatggagcggccgatgcactgcttcatcgcacgtctgaatgcgattctcttttcgagctgctgtgcaacgttctctgctacgagctgtgcgtcgaggtccgggcgcttaacttcaacaatgttgatgacgaccggcttgccgagctgcttctcgcactgtgcgcggagcttctcgatttctgcgccgcccttaccgatgaccataccgggctttgcgcagtgaatgtgaatgcgaaccttggaggcatcgcgctcaatttcaatcttcggaacacctgcgaggtagagctgcttcttcagcgttttgcggaggttgtagtcctcaacgagcgtatcgccgaaatcagctttctttgcgaaccagcgggaatcccagtctttgatgacgcccacgcgtaagccgtggggattaactttctgacccatttatgtgacctcctcgcttattccttctctttcacaacgagtgtgacatgagaggttctcttcaaaattctgtaagctcttccctgagctctcgggcggattctcttgagcatcggacccgggcaaacgtagcactcggaaacatagaggttgtttctgtccatgttgaagttgttctctgcgtttgcgatcgcgctcttgaggagcttctcgagatcttcgcacgccgccttcggggtgtgcttcaggattgccattgcgaggtcaacgggcttgtttctgatgaggtccagaacgatctcaaccttgcggggagaaattcgggtatacttcagaactgcttttgcttccatcttatactctcctttctcttagcggctggtcttggaaccggcgtgacccttgaaggtgcgggtcggggcgaactcgccgagcttgtgaccgaccatatcttctgtcacgtaaaccggaacgtgcttgcggccgtcatggacggcgattgtgtgaccgacgaaatccgggaagatcatggaagcgcggctccatgtcttgacgatcttcttttcgccgttctcattcattgcctgaatccttttaagcagtgcgggctgacaaaaaggacccttttttaagcttctgctcatgttcttttaagctcctttccgtgccttacttaccgtttctgcgcttaacgatgaacttgttgcttgccttcttcttggaacgagtcttataaccaagagccggcttgccccacggtgtaaccgggcccgggcgaccaacagggctcttgccctcaccgccgccgtgcgggtggtcattcgggttcatgacggaacctctgacggtcggtctccaacccatgtttctcttacggccggccttaccgatcttcacgttctcgtggtcgatattggaaacctggccgacggttgccatgcaggcatccggaacatttctcagctcgccggacgggagtctcagcagagccatgccgttttccttagccatcagctgagccatgatgccggctgcacgggcaagctgtgcgcccttgccgggataaagctcaacgttgtggacaaaggtaccggtggggatatttgcgagcggcagtgcgttgccgggcttaatatctgcatccttaccggagaatacctgatcgccgaccttcaggccgttcggtgcgatgatgtatctcttctcgccgtcttcgtactgcacgagtgcgatgaaagcggaacggttcgggtcgtactcgagggtaaggaccgtagcagccatgtcgttcttctggcgcttgaagtcgatcacacggtacttcttgcggttgccgccgcctctgtggcgaacggtgattctgccgtagctgttgcggccggcagctttattcttcggagccagcaggctcttctccggacccgtcttgctcaatgcgctgaagtccgtggtggacatgttgcggcgagcattcgtagtcggcttatagttaatgattgccattgtgtttcactccttgtttggctttgcgggatcgggcaaattcccattcatgcccttggggttcgaattactcgagccgaattaaaccatggactcgaagaactcgatggacttgctgccctcggtgagggttacaacagcctttttccaagctctggtgtagccttcatatctgccctggcggcggaacttgccgcgaacgttcagggtgttgaccttctgaaccttgacgccgaacagctcttcaaccgccttagcgatttcaatcttgtttgcatcctggcagacttcaaatgtgtacttcttattcgcaacgccggtcatggatttctccgtgatgatggggcgaatgacgatgtcctgcgctttcattatgcgtacacctcctcaattttggagacggcatcctttacaacgatgaacttgtccgcgttgaggatgtcatatacgttcagcgtgttgacctgtgcggtcttaacgcccgggatgttcgctgcggaagcgatgacctgtgcatcgacctcggagagaacgatgagcgccttcttctcgctgccgagcgccttgagcatctcagcaatcttcttcgtcttgtaaccctcggttgcgatggaatcgacaacgatcatttcgttatcctggaccttgctggagagtgcggacttcatagcgagacgcttcaccttcttgttgagggtgacggtgtaatctctcggcttcggtgcgaacacgatgccgccgtgtgtccactgcggagctctggtggagccctgtcttgcacggcctgtgcccttctgtctccacggctttctgccgccgccggaaacttcggaacgggtgagggcggactgtgtgccctgtctctggtttgcgagatacgccttgaccatatcattcatgacggaaacgttcggctcaataccgaaaacgccttctgcaagctcgatcttttcgacctctttgcctgccatgttcaaaactgctactgtaggcattctttattcctccttcccttacgctttcacgctgtcgcgcagaacaacggtgccgccgttcgggcccggaatagcgcccttaactgcgatgagattgttttctgcgtctaccttgacaacagcgaggttctggactgtgaccttctctgcgccgaggtgaccagccatcttcaggcccttccaaactctggacgggctggagcaagcaccgttggaaccgccgtggcgtgcaaccgggccggaaccgtgggtctctttaagtctctggaagttccagcgcttgatgacgccggcgtaacccttacctttgctggtgcccgttacgtcaaccttgtcgccgtttgcgaacacgtcagccttgatgaggtcgcctacgttgtaagcgccgcaatcgctgaatctgaattccttcagggtcttcttcggggcaacgtcgcccttcttgaagtggccggtgagcggcttgctcacgcgctgcggcttctgatcgccgaagccaacctgaactgcatcgtagccgtcgttttcaacagtcttcttctgtgtgacaacacacggaccggcttcaacaactgttacgggcacgactctgcccttttcgtcgaagatctgcgtcatgccgatcttcttgccgatgattgctttctgcattttgtatcctcctttaggttattggtcggatctctccgacatgaccctcctgcctgtaggttgagcggttatctgtcgaacgaaatcagagcttgatttcgatctcaacaccggcggggagctctaagcccatcaacgcctcaacggttttgttgctgggtctcaggatgtcgataagtctcttatgggttctcatctcgaactgctcacggctgtccttgtacttatgaacagcgcgcagaatcgtgacgatctgcttctctgtcggcagcggtaccgggccggaaactcttgcgcccgtgcgctttgcggtctgcacgatcttttcagctgcctgatcgacaacctgatgatcgtaacccttaattctaatcctgatcttttctttgactgccacttaaatcgcctcctgttaaattttagttggcgggcgggggtttttatgaacactggcccgggtgtttcaccaagaagccatataaaaaccggatattcacttttgtgaaatccgggatgcttttgggtcggtgtaaaatcacaaaaccctcataaaaaaaccattgatctgcctttttgtccggcctgtgcgccttagaaatcaacgcatggttccgcgcgccactcccgtaggagccgctcagcgtatcaaattgtgtcgcccggtttgaaatcggacatactccacggaaaaaccggcatgtctcagccgcaacctcccgcttcatcgcatatctgtcgcagtcacgcaagtattattataacaggcaaagtatgaaattgcaaccccttttttcgaaaaatttttcagcttttctgcggctttttccgttttttcaatttgcgccgtatcttgtgctttcacccgcgcggcatacaaccgacgaagcaaaaaacgggacggcccgaccgccccgtctttctttttatcgcacactttctatgcatctacaggctctacgcgcaggaaatccatcgtttccgccggctcacgcccgtctgcagagaacacgaactgcttatcctgcccatcgtccatgacttcgaaaaaggcggtcgtgccgtcggcaccgtacacaaagcgcagcgtctcaattgcgtttgacgcgggatcataccagccgccgtccgcatggcggatcggcccgtccggaaacgtcagctcccacaggcaatccaccggctcgtagattttcgttccctgcgccgtctccaccgtaaacgacgcccgcagctccgtcctacgcaggaaccggcacagccgccagcccttggcctccagcgcggcgggctccgccgccgtactgtcctccacccgcacgccggagagggaaatatggaacggcaggggcagcggcataagccagagcacaagcgcgagcagcacgatgcccacgcagacccgcccgataattttccggtttaatttcttcacagtaatactcctatcataagaaactagcggtttaatgtacgggtaatcttcacttccgatccatatctataccgcaccggacctgttgtatcctatccattattgtcaacagttcattaatatttttgaaatattatttaaccccccttgataacatgtctcttgttatcaaggggggtaactttatttaccagcctgcgcgcacaacgtagacgatcatatcgcgtctgccgaatgcggtgcagtcttccagcgtatcgtagtaaaggtctgccacgatgtcgccgcacatggccgctccgccggtgtccatggcgtagcagtagccatatgtccacgagccgtccaccgcggtgatgtacagcagcgaaccgtacgggatgcggtttgggtctacggcgacataaccgacctgcggtgtagcgccgatggatgtgacggcgcctgccggtgcatagtacgcagtgcaggaacccgtaaggctatactcaaaggaggacggtgcgccggaagcatctgtgaagacgttctgcttctcttttgtaccgcgcagcacgaccgcgctcttcgcttcctttaaaacttctttcgtcttggcgacgcggctttcttcctcgccgtccgcatacgtgaccgtgtaggtaactttggcttcgccttccacgccctcggtcttcgtctccgtttcgccctcatagagctcttcggtatcttcgtataccgtgctgtacgcaacagcttcgttctcgataacctcttcggtgcggatgcgcacaacgcggatcacatcgccgctcgatacgttatcctctgccttcacctgcttttcaccctctgcggtcgcgaccagaatgcggtcgttctcgccgagcgtaatgcccatggcttctacggcatcactgtaattttcagcggcaacgctcttctcggtcgttttgccgtctgccgtaacggtgaggtcaaggtaacgctgcacgcggatgcgcataccgtttgtaagtgcggtatccatggccggtgtgacggtgtcgttttcgccgagcgtgatgccggcggctttcagcgcgtcttctacggtgccctcgttgaggtcttccatgcggcgcttgccgtctgccgaaacaaacacacgctttgcacgggtgatctgcacggcgatgtctgccgtaagcgcggcggtgagatcggcatctgccgtatctcttgcgccgagcgtaatctcgttttccgcaaacacgtcggaaagcgttttgcctttcggggctaaaatcatctgggaggcgttatcctccttgacggaaacacgcacaaagcgctgcacggtgagcgtgccgttctccggggagaagtcgtaggtatcgatatccgaaacgggcgccatgccctcggtctgtgcgcgggaaagaatatcctgcgggttctgaccgatcatactgaatctgtatgtttcggagccgtcatatacggtgatatcggcggtatttgccataaccgtaacaacggaagagatgctgagcgctgcaaccagaacgacgatcagaaggatcttcggcatcaggctcttttgctgttttctaacatgccgcatagctcttgctcctttcaaaaaactgtgaagcgttttgcgcttcgatttggcaaagcttcggcggccaccccgccctcttgctttgcgtccactacctttcctgacctttgaaatacgggtgcaaaatgccctttccaaaagtcatttgagagtataatgtgaaaatgatggtctgtcaagttttttgaaaggctatttttgtgcaatatgctgagttacgcatggtgttttaatttacataacaactcatttgatatttttgaaagcgattatttgccttttttacggaacttttttgcggcgctctgtgcaatttgcaaaaattttgcaaaggcaaaaacatcgaacaaattttcttataccttaatattgtatattcttgcatattcatttcgatgaatttcgcgaactttctgcgttttcccgttttataccgtatattgttccgaatttgatacattccatgtgctgtgcggcacttttcctttacagcagaaattttcaaaaaaccgcggtcaaaaggcaggtatatttcataaaaagcgtgcggtattttgggcagctctccgaaaaaatcgcatttgcggctttggaaagcgggatgttcgtttcaatcgggccgattttgtgtcgaaatgcgtctcaccgtgtccgcagaaaaaattatcgtcaaccgatgtatagaatacacatgttaagtttacataacccgcgttttgcatagagttttgtttccgtgccgcgcacgtttttgatttgcttcttatatataatagaacatcacgggcagctttttagggccgaccgtgatgctttatctcatgcgttctgtttctttatataagcgataagctcgtttgccgcggtgcggtgtgcgcccacaccggggtggtcacggcagccgcgatttttgaggtcatccgtcagcgacagaaattccgcgttcgtgtcgcccgtttctgctttgtaatcgtctatggccttttgcagcgccggggcaagctccaagccgagcataccgtagatccacacaagacgggcgttggggtaatacccacgcaattgctttaaaaacgcggtcgcgccgtgcgcaaaacgcgcttcgtcttcggggttcagcttaccgtcttccgtgcggcggttctgaaacgtctcgccggttgtttcatctgtccaggcaggctgtgaaaacgcgccgcagtcgtttgtaccgaggttgatgaagacgtaattcggctgccattttgtgaaatcatacggctctttcgcgccgagggcaatgtttttttcgccgctcaaaaggccgcaaagctgcccgtagatgggcggaatggcactgtttgggtcgttgttccagccacagcacacgccccagccactctgcgatgagacacggatatcggcgtttaaagcacgggacaccatgacagcgtagttattctccgcactgaagaacatggaaatccagtctgtttccgctttcgcgccgatgtcgccctcgccgctcgtgatactgtcgccgatgaattcgatctttaaattgcgctccggcacgggcaggaattcgccgtctgtttcgatggcgttaatctgcaaaacactctccgggtcggcgttcatggcctgcgtatctttaaagatgcgcacgttcttgaccttttcggggtccatgccgcggaacacgcacacgcgctccgtgcccttttgcgccatgcggcgggagaagaactcgccattcaccataaagctgtaccacggctcgtggatgtcccaatccgccgtaaattccacccacagctcgctgccgcgcacattaagctctaagcccgccgccgtccagaacagcgtgagcggcgttaacgagccgtttgtgcgcccgtgcacaaggtgcggaacttcgagtaaggtatatcgcttgacttcgctcattttgcctccgcctcggcaagctccttcttataaagatacttgtcaatgtcttccttgatgttgtccggaatcttcttttccaccgggaacaccgccgcattgatcagcgtatcggcatacgtgagcacaatctccagcgttttgccgagtgcctctgcggaaaggaactccatggtatcaaaacggttgtggatatacgccgcaccttttgcaccgtcgcgggagaagttgattgccggaatgccgttatccgcaaacgggatggaatcggaagaataaatgctctggcgcgtcacagcggagaggccgttgattttgagcatgtaatcggtgtagtgtacgagggattcctcgcctgtgacagccgccgtgttatagccgaggatcggcgcaccgacgtcaacgttaatcatgaagacgtgatctttcagctcatccttgtggtcgcgcacgaatgccttgctgccctcgaggccgatctcttcactgccgtaccagcagaactttacggtacgcttcggcgggtgctgcgcgaaccaacgcgccgcttccatgttgatgacggagcctgcgccgttatcgtatacgcctttggaaaattcaacggagtcataatgtgcgccgaaggagataatctgctccggatgctcggtgcctttgatttccgcaatcacattgtgcgacgtgagtgtaaggttcttgttctgtacagtaacctttgcgcgggatgcacccttgttgacgatctccatagcgtccacggtgcgcagctgtaccgccggtgcattgccgaacgcacgcagcgcactgcgcagcttgcgttgatgcagatcggtattctcgaggtcatcgtgaatatcgccgtccatggtgacgacagctgcggcgcccgcttccatcaggctgcgatacagcggcacgcgcagaaagccgttgacgagcacaatcttgcccttgacgttcaacaggtcaaccgggagcgcattttccacgtagacaaaatccgccgtaaaaccgtctgcggcggtgctttccgcgcactggtaaccgcgcacggtatagctcttgcggtacggctccagaatctcgaatgtcgcttccacttcggcggattcgatctcaaacggctcaatcacggcggacagaccaaagctttcgcactccgctttcagaattttcgcggcttttaattcttctgaggagccggccacgcgcgtaaagccgattttatcgagcagtgcgaacgcacggttttcatcatattttttcaatgtaaacaactgcctttccctttgattttatacggtatttattcctattatatagtatacaaaataaattgcaagcaattttgcgccaaaatgaaagtgtacggctttaaaaatgcaaaaagcaagatcattccctgcttttagagaataatcctgcaattctgcatataaatttacttaaaacgcctgtgtgcagacgaatttaatctcttcgatctccatgccggtctggccgaagtagagcttgagataattcgtgccgccgaacagcacaccgatgtcctgctccgcggtaacgacctcgccgttcgtgccgttgatcataaccatgccgcgcaggttgccgtcgatgaagatagacatcggaatctgcgccacttcattggcgtttgcttttacgcgcatgacaaacttatagaggccgtttttcttatagcggatgccgagaatggtggaagcgcctttttccgtattgactgcggaaatgtcgagcggggcttcgccatcgatgaactgatactcgccgttgaaatcgacgtaatcttcgctcgtcttctccgcttctgcggcttcgcgctcctcatcgctcatgcggccaaggctgcgctccatcacaggcgagttcatcacggtgcggcagatattcatcgcagagcgcacgagcgcgtcacgcgtcagtctgccgtctgcaagggcgtcgtccaaattatcgtgttggctgttcgaggcggcgtccgcgttaaccatgttgaggtcattctgcgcgcgcacctgtgcagcgacgttctcgcgggtggcttcttcgccctcgcgatcgttgccctttgcccaccagtcggtcataacggtacctatgaagccccactcgtcgcgcaagatggtcgtgagcaggtcgaagttgctggccgtccaaatgccgttcagaccaccgtaggtggacatgacagagtatgcgccgccctcttttacggccgtttcaaacgcgcgcaggtaaatttcacgcagtgcgcgctcggaaaggacggaatcgatctcggttctcttaaactcctggttgttgcaggcaaagtgcttgatggtgccggtgacaccgaagcggcgcataccgcgcagctgtgcggcggcgagcttgccggtgagcagcgggtcctccgagaaatactcgaagtttctgccgtttaaggggctgcggtggatattgagacccgggccgagaagtgtatcgatgcggtttttgcgttgctctttgccttgcatggcgaaaagctcttcattcagcttctcattaaaggtgcaggcgagcaaggtgccgttcggcaggctgaacgcgatggtgccgcagtccatacgaatgccggaggggccgtctgcacagcaagctgtgggaataccgaagttgacgaggttttccgtgacgccgccgaacgcgcctgcggtgcccgctgtgaccttcggagagttcatgccctcgccgcgcataaggcagatgaggtcttcgtcggaaagctgcgctacaaagtcttccagctccgctttgccgtcgaatacatcgccgagcttgatgcccttgtcgcccgtatacggctttgcaggctttaatgccgccgcgctgcgggccgccatatcgtattcgcgctgcggtgcgggctcgaatgcgattgtgttattgtgattcaccatgcggtcaaacttcgtgaccggcgcgcacgcctgcacacacgtgcgggtaacggtatcttctttcacttcaaagctgccggagagctttgcgccgcgcacgcagccgcccgtgtagacattatacgcgccgctttcaagcacatagcagaatctgtgtcccgtaacgccgttgtcgtcgtaggacgcaagatttgcgattgggaacgtgagcgtaagcgtttcgctttcgcccggctgcagggtttcggtctttgcgaatgcggcgaggcttcttacggccttgccgagcttgccctgcggtgcttcaacgaagacggtgacgacctctttgccctgcacgtcgccggtgtttttcacggtgactttctctgtgacggtctcgccgtcgaaatcgaagctttcaaccgtgcgggtgaaggtcgtgtagctgagaccgtagccgaacggatacagcacacaatcttttgcgaacgtctcaaagtagcggtagccgacgtagatgtcttctttataaatgacccgtgtgggatcaccgaagccctctgtggacggataatcgctgatgtcaagcgcgatggtgtcgctcagcttgccgcacggcgtgacagtgcctgtgagaatatctgcagcgcctgcgccgccctcttggccgccctgccagacgtacagcacagcggcgggatcgtattctttcacccacttcatatcgatgatattgccgacgttcagcagaaccgcaacacgcttgaacgcgccgcaaacctcttttaacatctgatgctcggcggccgtcaagagatagcttccctctgcggcgctgttgtccttatcttcacccgcggtgcggccgatgatgacaacggcgatgtcggactttgcagcagcctgttcggcgagctctttcgtgacgggcatttcctcctggcaccacggctcctgtgcccagcccatgcccttttcaaacggatggtccttcagccagtcacggtaggtctgctccagctcctcgttgacggaaatgtctttgttttcttttaaagcgtccagaatgttcgtgacgtagcgggtgttgactgcgccgccggagcctgtgccgctcttataatagtcgaactgaattctgccgaacacggaaacgcgctcaccctttcggattggcagcgccttgtcgtcatttttcagcagcacgcagccttccgccacggcctgccgcgccagcgcggcatactcgttccaatcgatcttatacggattgctcatttttttcctttctgcatgatctatgccgtttacggtgtattctctttgttataatgataaacgattttgtggattttatcaagccgcgcagttaagtttctgtaaaaaaatcacgtgaacgaaaattttcgttgtaaaacgctttaaaaacggttatgatacatataaatagaaaccctttacggaaggagttaccgttatgcctgctttttatacccattatcgctttggctgcgatgttttaaaacagctgccggaggacatccgcagcatttgcaccgcgcaccgcgggctttttgacattggcttacacggaccggacatctactttttctatcgacccgttctgccgaacaaggtgaaccgcatcggctatgcggcacacaagcgctccgggcgctactttttacagcgcgcacagaaggtcattgcgtctgcgcatgacaaagatgctgcccgcgcgtatttctacgggcttttgtgccactttacgctggattctatctgccacccgtacatccacacggcgatgaaagaattcaacgtcacgcacgcggcgacggagaccgctttcgaccgcgctttgttactcaaagacggtaaagacccacagcactttgacccgtgcggccattttgaagtgaacacgcgcaacgccgccgtgatcacgcccttctacacaccggaagccactgtggcgctgaccgaaaagagcatctcttccatggtattctacggccgtgtgctgttcacgccgaacaaggcgctgcgccgcgccattgacaccgggctttacatcacgttccaccacgacgccattgccgatatgatgatgaccacgcaggacgtgccgagctgcaaactgtgcacggagcaccttatcgaactgtacggcaaagcactggagcttgcgaaaacgcttttcccggctgcgcaaaagctgctccaaaacgaaaaagtctcctgtccggagcttgaccgcacatttgacggctgatttcaaattttcaccaaaatgcccgccatgcaggaaccaaaacgttctgcacggcgggcattttatttcccgggttttaccctatagcaaaagctcccgttcacgaaagcctgtgaacgggagctttgattttcacttacagatacgatcagatttccggctctaccagatggcaggcgcagaaatgacccggacgaatttcacgcagctgcggcttcgcctctctgcacttgtcgcaggcggccgggcaacggccggcaaagttgcagcccttcggcgtgttgatcgggctcggcacgtcgccggaaagaatctggcggtgcttctgcgcttctgcactcgggtctggaatcggcactgcggaaagcagagccttggagtacggatgcagcgtgtgcgcatacagatcgtcggaagaagcgagctcaacgacattgccgaggtacataacggcgatacggtcgctgatgtacttgacgatgttgaggtcatgcgcaatgaagaggaacgtcagtccgagctgctgctgcaggtcgtgcagcaggttgatgatctgggactggatggaaacgtccagtgctgagatcggctcatcgcacacgatgaattccggctcgatagcgagcgcacgggcaatgccgatacgctggcgctgaccgccggagaactcatgcgggaagcggttggcgtgctctttgttcaggccgaccagctcgaggagctcgtatacgcgctcctgacggcgctttgcgtcgtacatgccgtggatgaccataccctcttcaatgatggaggaaacggtcatacgcggatccagagaagcatacggatcctggaaaatgatctgcgcttttttcgcatacttgaaacgcgttgcggcgtttttcagattcagctcttcgccggcatagtagagcttgccggacgttgcgggataaatgcccatggccacacggccgagcgtggacttgccgcagccggactcgccgacaaggccgagcgtttcgcccttataaatatcgagagaaatgtggtcgacggccttcagcataccgccggaaaccttaaagtgcttgcatacgtcgtccagaacgatcagtttttcattactgctcatccggctcacccctttctgctgcgctcgggcaatcgggatggagcagccagcatgctgcctcatggccctcgcccaccttgaataccggcggctgctcctcatgacaaatcttcatgcagtgtgtgcagcgggcaccgaaaccgcaacccttcggcgggttcagcaaatccggcggtgtgccggggatggaaacaaggcgctgggtcttgttcatatccacggacggcaggctctttaacaatgcctgcgtgtacgggtgcgcattgcgatagaaaatatcctcgcaggtgccggtctctacaaccttacctgcatacatgaccgccacgcggtctgccatggacgccacgacgccgaggtcgtgcgtgatgaggataatcgcggtgctggtcttctctttgatctcggcgagcaggtccataatctgcgcctgaatggtcacgtccagtgcggtggtcggctcatcggcaatgaggagcttcgggttgcaggaaagtgccattgcgatcatggcacgctgacgcatgccgccggagaattcgtgcggatactgctttgcacgctcttccgggttcggaatgttaacaagggagaggtacttaatggcttccgccttcgcctctgccttggaaagatgacggtggtgctgaatggcctcgacaatctgcttgccgacgggctttgtcgggttcaggcaggtcatcgggtcctggaagatcatggaaacttccttgccgcgaatcttctgcatttctttttcgttcgcggctacgatgtcgtgctcgccgagctgcacgctgccctctttaattcttgcgggcggcatggggttcagcttcatgatggtctgcgccgtgacgctcttgccgcagccggactcaccgacgatggcgagcacttcgccctcgctcagcgagaatgtgacgccgcggacagccttgacctcaccggcgtaggtatcgaaggaaacgtgcaggttctgcacatctaatactttattcatgttgaattacctcctcaagcgcgggtcaaatgcatcgcgcaggccgtcgcccaacaggttgaaggaaagcattgtaaggctgatggcaactgccggcacaacaagctggtacggatacgtcatgaacacatcttgaccgccctttgccagaacgccccaagacggctgcggaaccggaacaccgagaccgatgtaggaaaggaacgcctcggtgaaaatcgcgctcggaattgcgagggtgacgttgatgatgataacggaaagtgcattcggaatgaggtgctttgcaatgattctggagctctttgcgcccatggcttctgccgctacgatatattcctgactcttgagctggagcacctgaccacgcacaagacgtgccatgccggtccagccggtgatgccgtaggcgacgaccatggtgaagatgcccttcgggagcaccatcatcaaaagaataacgacgataaggtacggaataccgttgacgatctccacgatacgcatcatgatggtatcaaccgcgccgccgacgtaaccggaaataccgccgtagatcaggccgacgatgaggttgacgaacacggctgcgaacgcgatcatcagagagacgcggccgccttcaaaggcgcgcaggaaaaggtcacggccgaggttatcggtgccgaaatagtgtacatggtgctgtccctcatagcgggagtctgtacaaactgtcatgaagcccttgttgacttcgccaaggtgctgttcacggctctcaaacggagagaagaacggcacgatgatgcaggaaaggatgagaagcacgatgatgaagaaacacacaacggcaactttgtttttcatcagtctgccgatggcatctttccagaaggtcgtgctcgggcgggaaatgccctcgcggcgagcggagtcggaaccgatccactcaaaacggcttttatctatctgtgtcatactcagccctccaatttcacgcgcggatcaatgagaccatacgcaatatcgactacgaggttcgcaataataaggaacgcgccgtagaaaaccgtggtgccgcagatcatggtgtaatcgagaccctgaatgctctgcacgaaatacttgccgaggcccgggataccgaaaacgctttctacgacgaagccgccggtgaggatgcctgccgtgatcgggccgaggaccgtgacgaccggcatgatggcgttgcgcattgcatgcttaaagatgatgccgctctgggaaaggccttttgccttagcggtcttgatgtaatcctgaccgagaacgtccagcatgctggtacgcatcagacgggagatcgtcgcgagagaaccgaagccgagtgcgacaaccgggagaatgtggctgttgaagccttcccagccggtaatagcgaaaatacgcatgcccgttgccatatacagcttgaggccgaggaaatactgcaaaacagaggccacaacgaacgacggaacggaaacaccgagcagtgcaataatcatggcaactgtgtcggctgccttgccgcgcttaatggctgcgagtgtgccgaggagtacgccgccgatgaaggcgaagcaaatggaacggataccgacgtcaaacgaaatggcaaatgcttcggtgatcatcaatgtgaccgcacggttataggtaagggaaacgccaaggtcgccctgcacaacattaccgatataaatgaagaactgctgccatacgggcttatcaagaccgtatttcgcataaagcgcttccatctgtgccgcgggaagctgcttttcaccggtgaacgggtcgcccggaagaagctgcatcatgaagaatgtgatcgcgaccaacaggaacagggtaacaatggaatagcccacgcgctttaagatgtacttagtcatgtgcaatccacctctctttgatagtttaatagaatgattaaaggttatgcggacaatgccgccgacgtttttgggaacgatgccgccaaagcgtccgcggccttgtccgataaacgacaatatgacaatataacaaaaaatgtgcgcaaaagctcggaaattattctgccgcctttggcacatcaattttgtgaacttagcgaatgcagcttgtattgccgttcgcggaaatccccaaaatttcggggaaacaaggctttactcacccaacacagtgatgcgtatatcacctaaaagtgttgaagtaaaagattaaaagaataaatacagttcggtgcggcgcacccttttaagatgcaccgcaagccgtaaccgtatttgaatttcttttaagtatccgggtcagcgcccgtaaggttttcgattaggaaagctttacgtaaacagcgttgatatcctggaacgtagatctgtgcataccgcccttgatcttatcggagcaagcataggacggagctctccagaaggacgggccgatcgggagctgatccgcaatgatctgctcgcactcgatgaagtaagactcacgcttttcaaggtctgtctccttggctgcgaggtcgatgagctcatcgtatctctcgttggagaagccggtctggttgttgccgccatcggtgacccacatgtcaaggaaggtgttcgggtcgttgtagtccgggccccaaccggtgatggacatgacatagttgccggtcttacggttctgagaaccctgcttggtgatcatggagttaacggcaacctcgatgccgagaacctgtctccactgctcctgatagaaggaagcttctgcaatagacgtcggggagtcgccgcagtcgatggagaggtgagcggagagatcatctaccgtgcagccgagctcggagagagccgttgcaaggtattccttagctttttcctggtcacgggacggcgcatacagctcgccgaccttacctgcaaagggggtgccgtcagcagcggaaacaccgggcgccgtgaaggaagtcatcggctcgttatcgttctgccaaaccgtatcaatttccttctgcgcgtcaattgcattgaacagtgcacgacggagatttacattggagagatactggtcattgttgttgaagtaaatgtagaatgcggtaccatccgtataagactgaatcgtagcacctgctgctgtagcctgcttgatgagttcgccggtgccgagaccgaccatatccaggtcgcctgcgaggaaggaggagagagctgcgttggcatcggtgatgatcttccaatcgatctcttcaacttctacgtctgctgcgccgtgccatgcatcgtttttctgcataacgatcttatcgttgtggctccactcagtaagagcgaacgggccgttcgtgcagaagtactgcgcttcggtggagtagaggtctgcgcctacagcctcatagaatctctggttgatcggagcaagggtgccgaaggagaacaggaacagtgcgtacggagtcggctgctccatggtaacctcaagggtataatcatcgacaacctttacaccaacttcgtcccaagtaacttcaccgttgaagtacttttcagcgttcttgatgaagtagaggaagtaagcgtaatcagaagcaacatccgggttcaaagcctgactccaagcaaactcgaagtccttcgccgtaaccgggtcgccgtttgtccaaacgccgtccttacggaggtggaaggtgtaggtgagggtatcctcatcgtagtcccagctctcagctgcgcccggaactgtgttgtcgtcatcgtcgagggtgacgaggttctcatacatgtgcttgaacaaggagaactcgatggcatatgtggaggtcagggtgttcaggcctgtcggctccatacctgcgttcaggctgatagtctttgcagcgtctacggtcttcggggtgaagattgccgtagcgtcaccggatgcagccggggtggaatctccggaggcggtggactcggtggattctgcgctgctttcagaagctgtgatgctctcggtagatgtcttggagctgttgccgccgcacccagcgaatgcggaaacaaccaacgccgcggacagaaccagagctaaaaccttcttcagtttcatttcttgttcctcctaatgtgataggtgatagaattatgaaattttcgttcaaagaaaattcatattgcatacataatacagcataaagcgctaaatcgcaagtggcaaaactatggaaatcccgtcctaattttcgtgtatttttgtgaattatgaccttgaggcatatacacaccgtgcagtttttcatgatagtattgcaattttgtaattaaatccgcccaaaatccgccaaaaaaagccgcgtcaggggcatgtcctcgacaaaaatacaagtttccgcgtattgtgcacgaacgacggatagaaaccgaattcctgcattttacggtgaaatccgacaagttttctcctgtttttgaaagagaacgcgcaaaaatgcagtttacccggaaaatatgttggacattttcgaagttttgtccacctgcctctcccctatgtgcgctgttttctatgcgttttttgctgcaaagccatcctatatataatagtatgtgatattctaatatcgatatagaatacggatttttgctttagtttgcatcagatgtccttcactatgcatgcttaccggtttttgtgcaactgcggaaaacaaaacggaaccccttcgccgtgcagacgaagaggttccgtaatgcaaatttaaaatcagccgtggatagagtagttcggggcttccttcgtaatctgaatatcgtgcggatggctttccttcaaacccgcacccgtaatgcgcacgaactgtgccttctcgtgcatttccgggatatttgcgcaacccacataacccatgccggagcgcagaccgccgaccatctgataaatggtatctgcgagcggtcccttataaggcacgcggccctcaacgccttccggaacgtacttcttgttgtttgcctggaagtagcgatcgctggagcccttacccatagcgcccagagagcccatgccgcggtagaccttgaactgtctgccctgatagagctcgtactcgcccggggtctccttgcagcctgcaacaagggagccgagcataacaacgcttgcacctgctgcgagcgccttgacgatatcaccgctgtacttgatgccgccgtctgcgataaccggaacgccgtattccgccgccgcgcatgctgcgtcatacacagccgtgacctgcggcacgccgatgccggcaaccacacgggtggtgcagatggagcccgggccgatgccgatctttacgcagtctgcgccggcttcgataagcgcacgggtgccctctgccgttgcaacgttacccgcaatgagctggaggtccgggtatgctttcttgacctttttcactgcttcgatgatgccgctgttgtgaccgtgtgcagaatcgagcacgacaacatcgacctgtgcttccacaagggcagcaacgcggtccaaaacgtcagccgtagcgccgatagccgcgccgcagagcagacggccgccttcgtctcttgcagagttcgggtactgcacagctttttcaatatctttaatcgtgatgaggcccttcagatagcccttttcatcgacaatcggaagcttttcgattctgtggtggcgcaggatctcctgtgcatccttgagggtggtaccgaccggcgcggtgacgaggtgatccttcgtcatgacgttttcgatcttctggtcgaaatcggagccggacatgaagcgcaggtcgcggttcgtgatgatgccgacgagcttgccgttttcgcagatcggcacgccggagatcttgtagcggcccatgaggttatccgcctcgcgcacggtgttctccggcgcaaggaagaacggatcaacgataacgccgttctcggagcgcttgaccatatcgacctgatcggcctgacgctcaatggacatgttcttgtgaatgatgccgatgccgccctcacgcgcaatggcaatggccatatccgcttccgtgacggtatccatagccgccgtcataatgggggtgttcagcttgatcttctttgtgagatgagtggaaatgtctacctgactgggcagtacgtgtgattctgccgggatcagaagaacgtcgtcaaaggtgagcccctctttgacaaacttagaggtgaattctgtgttcagcataccgtcaaccatcctttcgccttgtgcaccgtgttttgttgtctttatgcggtaatttccgcataccgcataggaaaaatttcccggcaagccgggggaaatatattatttgatattagattgtaccactttcgcggtacattttcaactgttttgtcctcgaaaaaacagagatacccgctgagcgttctatgcgctttttagggaaaagccacaaaaagcggttttatgtggctaactcccggactttgggacgatttttgcaggattttgacggactgaacttctaaaaagcactcctcaaggcctcatccacttcctcgaaaaaggctgactgaaagccttattcgttcttgctccgatagcactcctttttataatatattagaaagtgctccctttgtaaaaaactttatacggaaattacaaaatgtcttgacactccgtcctgtttgatataccctaaaactactatatcaaaagcatatctcccgtacccgacacattcggcgcacggcatattttccgcgctccccctattacactcggccctattgggctaaaaggatggtttttcatgaacaagcttcgcagattgcgctccctctccccggagatggcggaaacgctacgccttgccggcgtgcagggcattttttgggcggccatggcggtaggcaattatcaaacagtctacctgcaaagcatcggctttcccgctacggatttcggcttattaaacgccattgcctgtgccgtcgctattttcgccatgacgttttggggcacggtgagcgatcgtatcggcagcgtgcgcaaaattgtcattttaacgctgacgctcggctgcggccttttcatttttgtgccgctcattccgacggggcaatcctactcaacgctattatttctaatcttgatcccgatcatcaactttttccgcgtaccgatgtcgccgtttgtcgataaccttacggtgcgcaactgtgcggagcatcgactgaattacggcatggtacgcagcagcggctcgcttttatttgccattgccggtgttatcacggtaaacgcgctcattcctgcggcgggtgtgccttcgacgttctgggtgatgggcattgtgatgattcctgccattgttctgacgtatttctgctttgagccgcagagcggcaagcgtgtaaaaaagagcgcaacgggtgccggcgtactgctgaaaaactacgcatacatggcgtttctcatttttgcattcttcttccagatggccgtggcgtttgaagggagcttcttgacgtattacatggcggatattcagatcgataccgtcaatcttgggctcattctctccgtgcgtgctatgatggaaatcccgtttctgttcttcatcggccgcctgcgccgccatatcaagatgaaatacctcatcatgctttctgcaattttgatggcgacggagtgtctgtgcttctgcttccttgtgaattcgctgccgactatgttggtatttgccgcgttttacggccttggcaacggtgcatttctcggcacgggcacgaactatatctatgagcttgcacccgtggagctgcgtgccacggcgcacagcctgttcatttccgtggcgcaaatctccggcattctcggcaacctgctcggcggcgttctgtttgacaccatcggcggcaaagcgttctatggcgtaacagcctgcatgtttctcgtttccgttgcgatcttcgccgcaagctttctcttccaccgcaataaaaaagaaacggctgcggcatgaccttcaaatactctgtgctcttaaaggctcgcttcggcgggccttttgttttgtctgaaaacacacgccttttttgtatatgtcgaaataacgtttccaatccattttacgctgctttttagcgtacccgcacgcaacatgtcgtaaaaatgaatgcgtaaagtatattgcctttccatatatagccgataccttgtgaaaaacttagtttcccccactataccgtgtgcttttccacactttccaccgagttttccacaccgtaattttgcagaattatgcatatttatacacaacttcgttctgcgattgtatggttgtttgttctcgcatcgtggacacatctgtgtatatctgtcgaaatgtgtccgtaatcggagatacatacgttcgaaactgttgaatattctttcactcctttaagttgaaaatctgttttccacatatcctcagaaaaagttttacacaagacgatggcgaaaactgttgccttttgaaagttcgtgttctttcgttccgctttgcatcatttctcctattttttaatacggtcatcagagcaagtctttctataagcagacggcaaaagaggcacatgcattttactttgcatgtgcctcttttgtcacctatttaatttgcaaaaatcactttttcgggacgataacttccttgccgcccatgtacggacgcagagcttccgggatgcgaacgctgccgtctgcctggaggttattctcaaggaatgcgatgagcatacgcggcggtgcaacaacggtgttgttcagcgtgtgggcaaggtacttgccgttttcgccgtttacgcggatgcgcagacggcgcgcctgtgcgtcaccgaggttggagcagctgccgacctcaaagtactttttctggcgcggggaccacgcttcaacgtccacagacttaaccttaagatctgcgaggtcgcccgagcagcactcgagcgtgcggaccgggatatccatgctgcggaacaggtctacggtgttcttccagagcttatcataccacttcatggagtcttccggcttgcagacgacaatcatttcctgcttttcaaactggtgaatacggtaaacgccgcgctcctcgatgccgtgtgcacctttttccttacggaagcacggagaatagctggtcagcgtgagcggcagttcggcttccggcaggatctggtcgatgaatttaccgatcatggagtgctcgctggtaccgacgagatacaggtcttcaccctcgatcttgtacatcatggaatccatttccgcaaagctcataacgccggtaacgacgtcgctgcgaatcatatacggcgggataacatacgtgaagccgcggtcaatcataaaatcgcgcgcatacgcgataacggcagagtgcagacgcgcgatgtcgcccatcagataatagaagccgttacccgcaacgcggcgtgcagcgtccagatcgataccgttgaagctttccatgatctccgtgtggtacggaaccgggaaatccggaacgaccggctcgccgaaacgctcaacctcgacgttttcgctgtcgtctttgccgaccggcacgctggcgtcgatgatattcggaatcgtcatcatgattttgaggatcttctcgtcgagctccttttccttcgcttctgcggcgatgagctcatcggactgtgccttgacctgtgccttgacttcctcagcttcggccttcttaccctgacccatcagtgcaccgatctgcttggagagcttatttctggaagcgcgcaggctgtcggccttctgctgcgtagcgcgtttttcggcgtccagctcgatgacttcatcgacaagcggaagcttcgcgtcttggaactttttcttgatattctcgcggacaatgtccggattttctctcaaaaacttaatatcgatcattttggaacattcctttcggttatttgtaaaactgcaaagttctttatttaaaagcgcttgctttgcaatcgcttcagaaaaccccttaatagggttttctacggttcaacagtctccctgactgttaaacctgctttcctgattttgatgtaggcaaaaaatttcgctttctgcggaaagcgacttagggctctgccctaagaatccgcaagttttctggagaaaacttgacgaaagactttattcgtccgttttatcggtcaatttcaaatcatacagcaggttcttgaggtcttcctcgccgtaaaattcgatcgtcagcgctgcttttttctttgtgccggagatatgcaccacacggtttaaaacgtcacgaagtgcaagctcggcctcatcatagtagcggatgcggcgctttgcgggtttatctgccttttccggcttctcctcgtttgcgcgctttgccattttttccaactcgcgcacggagatgccctccatggtcacgcgtcttgccgccgctttcatctggtcttcgtttttgaagctcagcagcgttctggcatggcccgcagtcatttcgccgcgctccagcatgttctgcatatcctccggcagattcaaaagccgcagtgcattcgtgatcgccgggcgggatttgcccactgtttttgcaatctcctcctgcgtgaactcgaagttatccatcagcatcttgtagccgtttgcttcttccagcggcttcaaattctcgcgctgcaagttctcaatcagcgccagctgcatcacttcgctgtccgtcaggtcgcggataaccgccggtacggtcgtcagtcctgccatgcgagaagcacgccagcgtcgttcacccgcaacgatctgatagccgccggaaagcagtgggcgtactaagattggttgcaaaacaccgtgctgcgcaatagaatccgccagctcggtcatcgcgccgtcatcaaagctctggcgcggctgcgtacggttcggctctaagtcgtttatgctgagctccaccgcgccggcatcatcctcacgcgcattgtcatagaaaattgcgtccagccccttgccgaggcctcctttttttgccattgcgaaagaccatctccttcttgtcgcatttataccgataccacacgattttgcgcatagaaccggttttgccgccgaaatcagcggtttttcttcaaaatttcgtccgcaagcgcaccgtatgcgatgcagcctttgttggatttatcgtagtacaagatcggctgtccgtagctcggcgcctcggaaagacgcactgtgcgcggaatgactgttgcaaacaccttgcgcgggaaatactttttgatttccgtcacaacctgctgtgtcaggttcagtctgccgtcatacatcgtcagcaaaacaccttccagctctaaacggtcgttgtaacggcgctttacagcctgcacggagctcatcagctgagaaaggccttccaacgcgtagtattcgcactgtactgggatcaaaacagagtccgaagcattcagcgcgttcgttgtaataagtcccagcgacggcgggcaatcgatgatgatatagtcaaattctgtgcgcagtggcgccaaagctttctttaaaacggactcgcgcccgttcaaatccgcaagctcaatctccgccgcagccagatcagccttggaagggatgacagaaagcttttcaaattttgtttcgagaacggcatcttcgccctttgccccgttgatgagaatatcatacgaggtcgttttcagcgttcggcgatcaaaacctacgccgctcgtggagttgccctgcgggtcaatatcgaccaaaagcgtctttttcccttttgcgccgagccatgcggcaatatttactgcgctggtcgtcttgcccacgccgcctttttggttcgccacggcaattaccttgctcatgtaccgcgcccctttccttcttctttctcttatataggatattgtagcacatatccggcacagaataaagagaaaagttcatttttttgcaacgtttcatgtgaaacagccggattttatcgcgttttggtaaattttgatgtttcatgtgaaacatttgcagttttaaatcgaaaaaagtattaaaaacacagaaggactgccggcatttgccgacaatccttctgtgttgtgggaaatgaataagggaatgggtttacctcgtactcgatattaagttctggcgcatcagcttgccttatgtgcagctgattttgggatgcggacgacgcattcgtaatactcatccgtttccttacgctgaaaagccgcgccgatgccggcctctttcatggtttggacagcatggtcgatcgtgttgaggaacaggcgaacatctttcgcaatgaatgtcctcttcggccttttcgcctgtccctcctgctccaaaagtgatttgatatacgtatccgtctgcgccacgttcattttgcgctctataacggtcttcaacgctgccatgcgcttttccggatcttccattctaagcaaatcacgcgcgtgacgctccgtaaggtggttttccagcaccatgcgctgctcttcgccggaaagccgcagcaaacggatcttgtttgcaagcgacggctggctcatgccgagcctacgtgcggtctcctcctgcgtcatagcgcgatcctgcatcaaagcatagattgcagcagcttcctcaaaaaaattcagatcactgcgctgcatgttttcaataagcgccaacaccgcgccgtcctgcggagaaagctcctgcacaatggccgggatggttttgagccccgccatacgcgaagcacgccagcggcgctcccctgccaccaaaacgtagcggtcgcgatctctgcgcacaagaatcggctgcaaaacgccgttttgacgaatgctttctgcgagctgcaaaagctcgtcctgcggaaaatccaatcgcggctgtgcaggatttggcacaatcttatccggtgaaagctccaaaagccttttcttttccgcaaatgccatacgccgcacctcctgcttgaatttccagtgtaagaagttgtcctttgtgagggcttgttctctttacaggaaatagcttaccacaatgaaaaggcagattttgccgcaatctgtcaacgtacaaaaagtttttcttgctttttcaaaacgcggtgctataataatagaaatattcaaacggaaaagcgtcgaaaaggcgcatattcccgccatttttagagaaaaggagcgaaagaacatgatctatgcagaaaccgaaatcaagctgaaaaacgggtgtaccgccgtcgtacgcaatgcgcgccctgaagatgccaagcaaacgattgaatacctgcgcaccgtttcgggcgaatctccgtttttactgcgtgagccggatgaggtgaatttcaccgtcgaaaaagaacgcgcaattttgcaaaacaaagcggaaagtccaaacgagatcatgctcaccgcttatgtaaacggcgagcttgccggcaactgttcgctggcgtcacaaggtgataagcgccgcatgaagcaccgctgctgtgtttccatcgcgttatatgaaaaatattgcaatcttggacttgggcgtgtattattaaacacacttttggagcttgcaaagcaatgcggatacacacaagcggaactgggtgtgattgaaggcaacgagcgtgcaaagcatgtttacgaaagcctcggatttaaagaatatggctttttaccaaattctctgcgctattccgacggcaccacgcgcggcgaatacttcatggtgaaagagttataagttccacgtgaaacaaaaaaagggcagctatgcgaattacctctgcatagctgcccttaaattttgagtgcttttacaaatatttcttaaaacccttcacttcactgtagccaatggcatcatagaatttatgcgcgccggtacgctgcaggccggagaccaaaatgcagtagtggcactctttctctctgccccacgtctcaatggcttcaaacatgccgcgtccgataccttttccgcggtacttttcgtccgtaacaacattttcaacgagtaaaatcggcttgcaggtatcgcaaatatcttcaaatacaacaccaatcaaagagccacaaaggtcgccgttttccgtattttcagctacaagcaaatagttatcctcgttctttgcaattttctctatcttttccgccattttctgcggatctgccatcgcatcggaaagctgcgccaaaagtgggttcagcttcggaatgtcgttcaattcggctttgcggtagataatgttcattttgcttcccctttctgttctaaaaatagtggctttttggtaatcgtaccgccgtgacgcggatacattttcggcgtaaagcgcaatttgcgcattacggcaacaaagcgctcgctctgttcctcatccggcagaatgaaaggaaccgtttttacaacatcgcatccaagcgaagagattgcttttcgggcatattccagttcatccggcagactcggacctttcatcgcggcaaaatagcccttcattttaatgagcggaatgcaatattccgccaaaatattcatatttgcgaccgcacgagccgttgcaacatcaaagctttcacgtagcttagtgtcttttccggcttcttccgcacgcttgtgaatcgtctcggcttcaatgccgatggcatcacacacttcgcgcagaaaaacaagccgcttattcaaagaatcgagcagcgtcagttcaatgtccgggcgcatgatcttgagcggaatgccgggaaagcccgcaccggtgcctacgtcgataactttcgcattctttttaatttcaagcgctttcagcaacgtcaagctatccacaaaatgttttatgactgcctcttccgggtcggtgatggccgtgaggttcatcacggtgttgcgctccaaaagcagatcaagatagatctggaactgctccgcctgtgcaggcgaaacctttacgccaatctcttttgcttttgaaatcagcagatttttaatatccataatcaaaatttcagctcgcctaaagcaaagctgccctttcagttttgttttataaatattatagtaattaagttcaattcattgcatgttaaatgtaacggacatcactttccttcattgtgcgcagagagccaaatcaacagcacggaaatatccgccggggaaacgccggaaatacgccctgcctgtcccacgttttccggacgcacgcgattgagtttttcctgtgcctcaagtcgcagacccgaaatctcggcgtagttgatctctttcggcagcagcttcttttccaaccggcgcatttcggcaatgtcctgcagctggcgcttgatgtagccctcatatttaagcgccgtctccacgctttcaaaaatctcacgcgggtaatccgggcgttcggtgtcgatgggtgtcaggtccgcataagtcacctgcgggcggcgcagcagctcagaaaggcgcacacccgtcgtgaccggcgatgtttcacatgaaaccagcacttcgttcagcgcgtccgtcggcgaaaacaccgttttctccgcacgcttcatctccgcttctttctgcgcctgcttcttttcaaacttcgcccaacggcggtcatcgatgagccccagctcgcggccgattggcgtcagtcgctcatcggcgttatcctgccgcagcacaagacggtattcagagcgcgaggtcatcatgcggtacgggtcggtgacgcctttcgtgatgaggtcgtcgatgagcgtgccgatgtacgagcccgcgcgatccaaaataagcgggtcacgatttaagactttcagcgcagcatttgcacctgccacaaaaccctgcgcggcggcttcttcatagccggaactgccgttgaactgccccgcgccgtaaagtcccggataatcgcgaaactccagcgtggcgttcagctgcagcgggtcgcagcaatcatattcgatcgcatacgcgtttcgcatgatttctacgtgctcaagccccttgatcgtgcggtaaaacgcaatctgcacttcttccggcagtgaagagctcataccctgcaagtacatctcctcggtttccgcgccgcacggttcaataaaaagctgatggcgcggcttttcggaaaagcgcatgatcttatcttcaatgctcgggcagtagcgcgggccaacgccttcgatcatgcccgtatacagcggcgaacggtggatattatcgagaataacctgcttcgtgcggtcgtttgtccagctcacgtagcacacagccgagtttttcggcggcatttccgcatcaaatgagaacggcgtgacaggttcatcgcccttttgaacctcgaggtcggtaaaatcgatggatgagcgcagcacacgcgccggggtgccggttttaaagcggcgcaacgaaatgccaagctcttttaaagaacccgcaagttccgtcgccgggaacatgccatccgggccgcccgcatacgaaacctcacccacaaagatgcgcccgccgagaaatgtgccggtcgccagtacaaccgcgcggcacgtgtaaaccgcgccgaggcgtgtcgtcagcagccagttttcgccgtctcgctcaatgtcgatgacctccgcctggcgcatcacgaggttttcgcactgctcaagcttatgcttcatcacgcgcgcgtacttgttgcggtcgatctgcgcgcgcagcgagtgcaccgcagggcctttaccaaggttcagcatgcggctttgcagcgtgcattcgtccgccgttttgcccatttcgccgccgagcgcgtccacttcgcgcacaaggtggccctttgctgtgccgccgatgctcgggttgcacgggcagttgcccacagcgtccatgtttattgtgaagatcaccgtgcggcagccgagacgcgccgaggccaaagccgcctcaattcccgcgtgtcccgcgccgatcacggcaacatcgtattttcctgcatcatagctcataatttaacttcttttccgatttattctgaaatacagcttattccaaagataaaatataacaattttgatattttattttcccacgcagaacttttcaaatacctgatcgaccaccgcatccgaaacacgctctccggtcagttcatttaaagctgcaatggcaccctccagcgagaccgtcaccgcgtcccacgtcatgcccataagcaaagcgttttccgcttcctccaacgccgtgagcgcctcttgtacgtccgcgcgttggcgctccgtatagagaatgccgtcgttcgggttcagctcagcggttttcagtgcgtgcgctgcagcgttttgcagcgcaggcagtccctcgccggaaattgccgagaccgtcacgacctctttgaaatgcttatcgatctccgcacggtcgatcttcggcgcgaggtcggatttattgatgaccgccacggccggtgtatcgcctatggcgtccatcaacgcgcggtcgtcgtcgttcagctcttcactcgcatcaaacaccgccagcacaaactgtgccgttttgacgcgatctaaagccatgcgcacgccgatctgctccacgcggtcttccgtatcgcggataccggcggtatcggcaagacgcagcggaatttcaccgagcagcacagtctcctccaccacgtcacgcgtcgtgcccgcaagatcggtcacaatggagcgctcgcagcccgcaagcaggttcatcagcgtggatttgccggcgttcgggcggcctgcaatgaccgtcaccacgccttcacgcagaatgcgcccgccgtcaaagccggcgagcaagtctttcagcgccgtttttccggcggcaaggcgcgttttcagcatcgtctcatccacctgtggaatgtcgtcgtccgggtaatccgcccacgcggcaaggtgcgcaccaatgtccgtcagatccgaacgcagcttttcaatgcggcgggaaagtgcgccgtcgtgtcccgcctgcgccgctttcatcgcttcgcgcccctgcgcggagatgatctgcatgacggcttccgcctgcgcaaggtccattttgccgtttaaaaacgcgcggcgcgtaaattcgcccggcgccgcagagaccgcaccggcagcaaaaaccgcctgcaaaaccgcttttaaaacgaacaatcctccgtggcaggaaagctccaccacgtcttcacccgtaaagctgtgcggtgcggcaaaaacggtcgcaatgcactcatcgaggcgctcgccgtccggcgcatacacgtgtccgaagcggcacgtgtaacccgccatatcacagagcttcgcgccggaaaacgacttaaaaacacggtcgccgaccgcgcgggcctcatcgcccgaaatgcgaatgactccgatgccgcccggcgccgccgccgtagagattgctgcaatggtcttcatagtttatcccttcttctcgctcgctgcacatgcaacactttctcattttgtattatatcacgcggcgaaaagattgtcacgcagaatgtcggaaaacgcaggaaaatcacagagaaagcgtaaaaacctccgcatacgcaaagtatacggaggttctctgttttaaagttttagtttttggagatcttaccgtaaggcgtagaaacgtcgtccagaacgcgcggtgctgcgggagcggtgcggttctgcatcggacggctgtcgcggttatctctgcgcggagcgcggcctccgcgattatcgcggttgtagccgccgtttctgccgcggttattgccgccgcgacggttatcgcgtcttacgtagcgctcgccgccctcagggccgatcacaacgtgacgggcaaggtcttcaccctcgctccaagatttcgcaccctcaacctcctgcacggcggtgtggatgatgcggcgctcatacggattcatcggctccaaggaggcattgcgaccggtctttacggcgcgggcagccatctttctgccgaggttttcaagcgtttccttgcgcttttcgcggtaattgcccacgtccagcgtaatgcgataataagactcgtccacatggtttgcaacgagagacgcaagatactggagggaatccagcgtttcgccgcggtggccgatgatgaagccgatattttcgccggtgagcacaagctctgcgcctgcctcttcttcgcggatctcaatatttacgtcgccgaggcccatgccggaaagaacgttgcgcagatactctgctgcggcgtctgccggtgtggaacggatgaacgcgcgcacctttgccggtctgccgccgaaaaggccgaagcgctttttctcttccgtttcgagaacttcaaactctgcgtctgcgggatctacgcccagcattgcgcatgctttttcatacgcttcttctgtggttgcgcctgttgcgattgcttcttttaccatggctttcttcttcctttcttcttttcaatactctatctttatcccgtttcggagtgaaaggaggtggggataacagcctttatttatttcttgcttccgagataatcggtagaattgcctttgtttttctgcgcatttccgccttttttaccggccgctttcttttccttctgcgcggcctggcgctctgcctgcgcctggttcttcgcctcaatcttatcggcaatctgcttttgcagatttgcgggcagcggcttcaccttccgatctgcctgtaaaagcgtcacatagcggctcgcttccgactttgcggagacctgctccggcgaaaaatacttgtgcgtgatgagcgtctgtgcaaaaccgaccagcgcggaaataatccaatagaaaccgacagctgccggcatgatgtatgcccagtatgcagacagaagcggcatgccgtacatcatgaccttcatgcagccctgacctgcgccctgctgctgtgtgggctgcagcttctgcatgacaaaggactggccccagtaggtcacaagtgccagcaccgggatgatccacagcatagaagcgaacgagctcgtgttcggggacgcgagcaggtcaagaccgaagcatttgaagcccttgccgaaaaactcaatcttctgcacatcgtccgcggagaacatcgtcaggtggtccttcagtgcgtcgaaattcttaacgatctcaagctctacatactggttcgtgctcgcaatgcccggaatcttagaaacgaattccgtagcctgcgaaatagtgtcctttgcaatatgcagggtgttcgagagcggataaataacggagtaataaatgccgagcatgatcgggaacggaagcagcgtcgtcagacagccgccgccgggattcacaccctctttttcgtagagcttctgcagctcttcgttatacttcatctggtccttggcgtacttcttctgcagctcctgctgcttgcttgccaatctggactgcgccgccatgctcttctgcgatttaatcgagaacgggaacatcagcgcctttacgatgatcgtgaacaggatgatcgcgataccgtagtttttgaaaacggtgtacaggaaccacagcagataaccgagtacgctgccgaagaaattaaaaatagacatcatagtagttgaccaaatccttcccggatcaaaacttattcttttttccgcttttccggcacggggtcatagccaccgcgggaaaacggattgcaccgcagaacgcgccaaagcgcaagcacgccgccgagtaaggcgccgtatcgctccacggcttcttccccgtactgcgagcaggtggggatatacttgcagcagccgcgcgtcgtgcgcggtctcagcttccgatacagatggatgagcccgatgacggcgcggcgcggccaataccgcacaccctttttcgccgaaaagcgtccgcccttatattgtatcgcagcggacacaggctctttctgttttctcatactgcttttctgctctgtcgttatgaaaattcttctttcgttacacttgcggtttcttcgcccgactccgaagtctttccggagtcattttccgccgtttttgcggagttatttctatctttgggtagggcaacaagcacgccgagttcctcaagcgcgctttttaactgcgaagatacgatttgatagtttgcgaacggcgttctgccgcggctgacgaggacaaggtcataccccggcttcagctgcgggtacagcgcacggatgctttcacgcagaaggcgccgcgcacggttccgcttaaccgcgttgccgatctttttgctggccgtaatgcccacgcgcgcctgcttcacctttttattgcgcaggcaatacagcacaagcgccgggcgcaccgcgctttttccgcgggcgtaaacgcgcttatactcgtggttttcggtcagcggcacaaggatgtccatgggtaagcctccaaagccgttcggtaaggccaaagctgagtatagcagagccttgccgccgaaaaaatcaggcaaaacaaagaaaggtcacgcagcggtgaccctcaaagcatacattagtaggttaaacgtgctctgccctttgctctgcgacgcgccagaactttacgtccgttgcgtgtagacattctctttctgaagccgtgctccttctttctgtggagcttcttcggctgataggttctcagcatatcaaaaaccctcctttcacgaggttacttatcaaaatgcggtctgcaaataacagtccgttacagataagcattataccttaaaaccgtagaagctgtcaaccttttttcgggtttttacggaaaaaaacttggaatgaagcgccgcaaaggcaaaagcagacgaaaatagaaggcctacatgtttttttcagcctgaaaaaacacaaatcaaagtgagtgatgctaaaagcctttaatcgatcttttttcaagaaagattgtggaggctcggggcaaaatttcccattcctgcgttaaaaatccgccttcgcgctccctttttccaccctttctgcgtataaattgccgaaaacacgtttctttcccgctttttgcctgtgaagtccgtcagatttttcaacattccacaggttttctgtggacaactttgcggttttgtgctacactatatattagtattttagcgtcaaaatgcactttcaatgccgcttcttcggtcatcatgaccgccgcggcgcggctatgggcgcataccgataccaaaacctaaaagaaagggaataaggaaatggaatcattcttagaagcatgggacctcatttgcgactactgcaaaaagcaggtcaccgacgtgagctatgaaacctggttcagcaagctcgtccccatctcgctcgatttcggagcaggcgttgcaatcattcaagcgccgaacgaatttaacaaatccaccatcgagcgcggctttcacaagtgcttgaacgacgccgtacagagcgttttcggcgaagctttcacctataagctcatcaccccgatggagaaaaaagaaaaagagcgcgtgccggacgatgacgaatacgagtacacgtttgaaacgttcatcgagggcagctccaataaatttgcctgcgcagcctgccgctatgttgcaaaagagccggccaaaaactacaatcccctctttatctacggcaactccggcctcggcaaaacgcacctgctcaacgccatcggtcacgagctcaaaaagaatttcccggataaggatatcatttacgtcaagggcgaccagtttgcaaacgagctgatcgaggccatccgcgccggtaccaccgtgagtttccgcgaaaagtaccgcaaggccgacgcactcctcatcgacgatattcagttcatcgccggcaaggaatccacgcaggaagagttcttccacacattcaatacattatacgaatccaaaaagcagatcgttttaacaagcgaccgtcccccgcgcgacatcgctaccttggaagatcgtctgaagacccgctttgaatggggccttaccgccgatgtgcagccgccggactttgagacccgcatggcaatcatcaagcgcaaagccgagcttgtcggtctcagtgtgccggacaacgtctgtgaatttatcgcacagaagctcaagagcaacatccgccagctggaaggcacggtcaaaaagctcaacgccatccatcttgtggaaggcgccacccccactatcagcacggcacagcgcgccatcagcgacatcgtaaacaacgagcagcctgcgcctgtcaccgtcagcaaaatcattgaagaagtcggccgcacctacggcgtttccccggaagatatcaagtcctccaagcgcaacgcaaatgtttcctttgcgcgccagatctccatgtatgtcgtgcgcgagattacacagatgcctatggtcgagatcggcaaggaattcggcggcagagaccactccaccgtcgtttacgccatccagcaaatcgaagaaaaatctgcgcgcgatcccgtgacgaaggccaccgtcagcgacatcatcaaaaatattcgcgaccgctgatcttctttcacccctaaagtgctccatttcccttattctttcctatatactggaatacaggcaaattcgctgtacttttaaaaatatcaaatacagagcatttcctataacgttctgtataattgtcgtagactttcttgtggctatctttgaagcacaaccacaagatatagggtatgatctccagtgtccttacacacgaaagtcaaaataaaatcaacgagttttcaacatttcacacagagttttcaactgctctgtggacgaaatcaaattttccacactctccacaatccctccacatccattttcgcaaaactttcgcgcgattttcacctgtccaaagccactttttgaagtttccaactttttcacaccctctacgactactgctataacttatacttaaaataaatataaaaaaggaccgcaagcttactccttccacatctccacacccaaaaacacatagaaatgtaaaaaaccaaaatgcgcggtaaaacttccgcggtccaaaatgctaaacaaaaggccaaaaccacaaaaccgcgcagaaaggaagaacttatccacatgaaattcaccgtagaaaaaagattgttgaacgaagccgtaaccaatctgcaaagagcggtttcctccaaaacttctattccggcgctcgaaggcatcctcatccgcagcgaagaaaaccgcctcattttaaccgcttacgatcttgaaatcagcatgcaaaccgagctacccgccatcatttccgcgccgggcgcgatcatcctcaccgcaaagctgttcgccgagatcgtccgccgttcgccggacgaggacatcaccattgacgtggacgaccgcaacaccgccaccatcacctccggcgtgagctgcttcaccatcatcggtatggattcggcagaattcccggagctgccgaaaatcaccgacgccgatacaatcaaaatgccgcaggaactcttaaaaagtatgattcgccagacgctttttgccgtcgcggacagcaccgcaaagccgatccatcagggcagtttgttcaaaattgaaaacggaaatttagatgttgtgtcggttgacggctaccggttggccctgcgccgcgaggcgattaactacgcgaacagcaccgaatttgtcgttcctggaaagacactttccgaagtactcaagctcttaaaggacagcgagggcgaagtggagatttgtccgagccgccgccacattttgttccgcatcgataattatacggttatttctgctttgctcgagggcgaattcctcgattataaatcggcactgccgaaggataaaaaaaccgaagttacggtttccactcgtacgatgatcgaaagtgtcgagcgcgtttcgcttctcatcaccgaccgcctgaaaagcccggtgcgctgcgtgattggcgaagacaccgtcaagcttttctgcaccaccaccatgggccgtgccaccgaccagatttcagcggaaatttccggagaccagcttgaaatcggtttcaataacaaatatttactcgatgcactccgcgcggcggagaccgacgaagttcgactgcagctcggcggcccgatcagcccgatgctcgttctgccgaaggagggcgacgcgttttcgttcctcgtcctgccggtacgcctgcgcagcgaaatgtgatcgatgtttcacgcgctgtccgccattcacggacaagtgttacgactttcgtgaaacattaacttgtgaagctttgacaccaaaatctaaagtataaattccgtacaactttaatgtgcgaacaaacgcgaagattcgtacattaaatttatctttattttataaaggatcgaatatattatgaaaaatgagatcatcacgatcacaacggagttcatccgtctggatgcacttttaaagcttggcggcgcgttggataccggcggacaggccaaattcgtcattcaaaacggcgaagtcgaagtaaatggcgaagtctgcaccatgcgtggaaagaaaatgcgcgacggcgactatgccgaatataacggcggccgctatacggtaaaagtggaggaatgagccggtgaacgtactgcgcctcggctttgaaaatttccgaaatttgtgcccgggcgaaatttttccgggcgaaaccatcaatgtcattcacggcagcaatgcccagggcaaaacgaatttgcttgaggccatctggctttttacgggcggacattcgtttcgcggcacaaaggatagtgagttgccggttttaaaagacggcaaaaatgcgcctgcggcctcactttccatgacgctgtttacagaaggacgcgagcaggagctaaggctcgaactgcgcgacggtcggcgctccagtgtcatcaacggcgtggagaaaaagaccggctcggcgcttgtgggcaagttctgcgccgtcattttttcgccggagcatcttttgctcgtcaaagaaggcccttcgcgccgccgcgcgtttttagacggtgcgttgtgccagtcccgcccggcatttacgcgcgttttggcgcattataataaagctctcatgcagcgcaatgcgcttttaaaggatattccgcgtcacccggagcttatcgatacgcttgatgtttgggacgagcgccttattctgttcggcacggaggtcgtacaggagcgcgctgcgttctgcaaagatctggagccgcgtgcggcggaaatttaccggggtatcgcgaaaaacagggaggaaatcacgctttcttacgcgccgtttggcggtgcggagacaaaaacggagattgccgagcggttttccgaagcgctgaaaaacgccagaaatgccgatgctcgcgcggggtttacgtccgtcggcccgcacagagatgatttgatgctcaccatagacggactttccgccagaacgttcggttcgcaggggcagcagcgcagcatcgtgctggcgttaaagcttgcggaagccgatattctgtaccgaaaaaccggcgagcgcccggttatcttgctcgatgacgtgatgagtgagcttgatatgagccgccgcgattatcttttgaatcaccttgacgggcggcaggtgttcatcacgtgttgcgacccggaaactgtgcgcctgatggaaacgggacgcgggttctatgtggaaaaaggcacggtgcggcaggatacggacgaaaaagcaggggaagtgcacgcggaaaacgaaacgccgacttgcgaaagcgagtaaacctgtggtatgataaggagcatggtatgtatattcaccttggtatgggcgttgtagtgcgcgaagaagacgtcgtgggcattttcgatatggaaaacaccacggtctccggcgcaacgcgcgattttttgaagcgcgcccaaaaagagaaccttgtggaagacgtgtgctatgacctgccgcgttccattgtggtttgcagagactatatcggcggcgagcgcgtgtatatcacgcagattgctccggccacgcttttaaaacgctcccgcgcggagatcggcggcattgcgctgagaccgcacgccaagggactgtaacagaaaggatcttcatttatgcagtatttcggcattcctacctgtccgtattgcaaaaagcatgtcaaccttgttcgcacgtggagattgaagcgtgagggcgagtataaatgcccgcgctgcggcggtatttccaatatctatctttctccgctcgtgtatgtgtttgccgtgctggctatctgcgccggcgtgtgcatctatttcttccataaattcgttttggatgacatcaagctgttcacttgcctgcaaattttcatcccgtttgcgattttcttctttttaagccttttcacggtgtatttaaagcgccctgtcatccgcagagtacaacgcgaagccccgcgacaggctccgcagcgcaatgcggaaccggaaagacgtgctccgagccgtgacgatacgtttacggagatgaatacgggcagatacagagaaaataacgagccggagcgcagagtgaaccgacgcgtctgaattctgacggcaagtaaaatgtaaaggtctttgattaaactttcttcagaaagcttatagggtctcggggcaaagccctgaaaaacagaaaatccacacggaaaagagctgccgaattgtaatttacgggcggctctttttgcgttcttaccgaccgaaaaaccgcagaaaagaggggaaagcggtgtgcattttcaaatatacatgcttttgtatgtttatgcacaaaaagccgcagaaaatctaagctttcagccgacatttttcaaaaatgaccttgtaaattttaccgttttgtactatactattatataaagataaccgcctgcggaactgtacaaatgaaacaggcggcgtttctctttgaatagatagcgaatgaatgtcttttatttcaaaggcacaaaaacacattcggcgttttcgtgccgaagaaaggaaaatgagagttaatatggatattaacgaaatgacgcatgtggatacgaattacgattcggatcaaatacaggtccttgaaggtctggaagccgtccgcaagcgcccgggcatgtacatcggctccaccggtccgcgcggcctgcaccaccttgtttacgaaatcgtagataacgccatcgacgaagcgcttgcaggctattgcgaccgcatcgatgtgcgcatcctgcccggcgatatcatctgcgtgcaggataacggccgcggcgtgccggtcggtgtgcagcaccagacgggtctgccggccgtgacggttgtgtacaccattttgcatgccggcggcaaattcggcggcggcagctataaggtttccggcggtctgcacggcgttggcgcttccgtcgtcaatgcgctttccacgtggctggaggtcgaggtgcgccagggcggtcacctgtaccgccagcgcttctcgcgcggcaatgcggaatatgacctgcaggatctcggccccatcgaaaacccggagcagacaggtaccatggttacgtttaaggctgaccccgagatattcaaagaaaccaccgtttatgattttgccacgctcgaaacgcgtctgcgcgagcaggcatttttgaacgccggcgtcaacatcatcctcaccgatgagcgtgacccggagaacatcaaaagcgaccgtttccactacgagggcggtgtagcaagctttgtggagtacttgaaccgcaaaaaagccgtggaggtcatccacccggatgtcatttatttctccgcgaccgcgccggacaacaactccacctgcgaaatcgccatgcagtatacggacagctttaacgagctgattttgtcctttgcaaacaacattcacacggtggacggcggtacgcacgaagacggcttcaagcgcgccttaacgcgtgtgatgaacgattacgcaagaaagtacaatatcttaaaggaagccgacaaaaacctttccggcgaggatgtgcgcgagggtcttacgtgcgtcatcagcgtaaaggtgaaggaggcgcagttcgagggccagacgaagggaaaactcggcaatacggaaatcagcggccttgtcagcaatctgatgagcgacaagctgatgacgttccttgaagaaaaccccgccgtggcacgcgccattttcgacaaagccatggcggcctcccgcgcaagagaagcggcgagaaaggcaagagaccttgtgcgccgcaaatctgcgctcgaaaacgcaacactgcccggcaagctcgcagactgccagtcccgcaacccggaagagaccgaaatttacatcgtcgagggcgattccgcaggcggctccgcaaagggcggcagagaccgcaaatttcaggcgatcctccccctgtggggtaaaatgctgaacgttgagaaggcacgcttagaccgcgtttacggcaacgataagctcatgccggtcattacggcactcggtacgggcatcggcgaagagttcgatttgaataaactccgttacggccgcgtcatcatcatggccgatgccgatgtcgatggttcgcacatccgcactttgcttttgacgttcttctaccgctatatgcgtccgcttgtcgaagagggacacgtgtacatcgcacagccgccgctgttccgcatcacgaagaataagcgccactattacgcgtattccgataacgagcgcgacgagatcatgacgcagctgcagagcggctacgatattcagcgctacaaaggccttggtgaaatggactccgagcagctttgggagacgaccatgaacccggagacccgcgtcatgctgcaggtcacgccgagcgatgccgcacaggcggacgaaatcttcaccattttgatgggtgataaggtagagccgcgccgcgagttcattgagcgcaacgcaaagtacgtaaagaatctggacatttaagcgcgaaaggatcagcaagcaatggataatatggaagaaaagaaggaaaacctcatacaggtggacctcagagagatcatggagacgtcgttcctcgattactccatgtccgttatcgtgcagcgtgcgctgccggacgtgcgcgacggcttaaagccggtccaccgccgtattctctacaccatgtatgaaaacgctctgtggccggaaaaggcttacagaaagtgcgcggataccgtcggttccgtactgggccgctaccatccgcacggcgatgcttcggtttatgacgcgctggtgcgtcttgcgcaggatttttccatgcgctatatgctcattgacggccacggcaacttcggttccgtagacggcgatccgcctgctgcataccgttacacggaagcccgcatgagtaagctttctgtggaaatgctgaaggatattgagaaggacacggtcgatttctccccgaactacgacgaccgtttgaaagagccgaacgtgctgccctctcatttcccgaatatcctcgtaaacggttccaccggtatcgccgtcggtatggcgacgaacattccgccgcacaacatgggcgaagtgcttgatggcgtgtgcgctatggtggataaccccgatatcgaccttgacggcctcatgcagtacattaaagggccggatttcccgaccggcggcatcattatgggccgcagcggtatccgcgccgcatacggcaccggccgcggcagaatttacgtgcgtgcccgcgcagagatcgtggaaaagccgaacggccgctaccagatcgtcgtcaccgagctgccgtatcaggtcaacaaagcaagactcatcgaaaacatcgcagagcttgtcaaggataagcgcatcgacggcatctccaatatcgacgatcattccgaccgcaacggtatgcacattgccatcgacatcaagcgcgaagcttccccgcagctcgttttgaaccacctgtattcgcttacgcagatgcagatcacgttcggcgtcattatgctggccattgtagacggtcagccgaagctgctcaccctgcgcgatattctgcaggaatacatcaagttccagagtgaagttgtgctgcgccgcacgcagttcgaccttaaaaaggcgcaggagcgcgcccacattctggaaggcctcatgatcgcgctcgacttcatcgatgaagtcatcgccatcttgagaaattccaagtctatcccggaaggcaaagtcgccctcatggagcgcttcggccttgacgatgtgcaggcacaggccatcgtgcagatgcgccttggccagctgaccggccttgagagaacaaagctcgaggaagagcttgccgcactgcgcctgaagattgcggatttcctcgacatcatcgcaagcgaagcgcgccgctacggcatcatcaaggatgaagccatggagatgaagaagcgcttcagcgacgagcgccgcacggagatcgccgccatttccggcgaaatggacgtggaagacctcatcccggaggaagactgcgtcttgacactgacgaacttcggctacgtaaagcgccagacgctcgacacgtaccgcacacagcgccgcggcggacgcggcatctccggcatgagccgccgcgaagaagacgttgcgagcgagctgttcattgcaaattcgcatgacttcgtactgttcttctccgacagagggcgcgtgtaccgcttaaagtgctacgagattccggagggctcccgcacaagccgcggcatgaacatcacaaatctgctgccgcttgagcccgaggagcgcatcacctctatgctgcgcgtcacaaagtccgaggaggaagaccacttcctcaccatggtcacaaagaacgccgtcatcaagcgcgttgcgctctctgcgttccgcaatgtgcgcaaaaacggtcttatcgcactcgatctcgccgaggatgacgagctcagctgggtgcgcctgacgagcggcagcgatgatctgctcgttgcaacgcgcttcggcaaggccattcgtttccacgaggccgacgtgcgcgaaatgggccgtcaggcccgcggcgtgcgcgccatccgtcttgcagagggtgacgttgtggtcggcatgagcgtcctgcgcgaaaacggtctcgtgcttacggtttccgagaccggctacggccgcctctcgaaccccgaggattaccgcctgcagcatcgcggcggcatgggtatcctcaactaccacgttgaaaaatacggcaatgtcgcggccattaaggtcgttgatctcaatgacgacatcattctcatcgcagatgacggtgtgattatccgtatcgaagccggttccattcgcatctgtgcacgtcccagcaagggtgttcgcgtgatgaaggtcaacgagggcagcaaggttatcactatggcccgcgccccgcatgacgacgaggaagaaatcagcgccgtagaagacgacggcaccgccgaagagggcgaagatgagcccgtaacggaagcggaagacgtcatccgtgacgatgaacccgcagaagaaacagaagaaaccacggaagagtaattttccgggcaataaaaaagagcgttggtcagaagaccggcgctctttttgcaatttttcaattacgcgttcggatccataatggcgccgtgaccgcagcagtaggtgtacacgtccgtcgggaacaggctctgcaaatatttgcgctccgcggcggcgcggcgggaatcgaggttcacggtggtcattaaatacggtgcaagcaggttaaaatcatactgctcttttgaaaagcccttgatgttcaccatgatgtcgccgctgaaaacaatgcggtgcgcgtcatccacaagcacgatctcgcccttaaagtgcccgccgttgccgtcgaaaacacgcagggtaagaccctcaaactccagcgtgccgcgcggggagatgggtgcgtcgcttgcaggctctgtgtgctcaataacgcgcagcgtgtgcatatcgggtggcgtgtagcccgtcatcagcttgcagatgcggttatacggcgcacaaatgcggttctgctcgcgcagatcgggcagaccgttgttctgcaaggcgaaattcagccgcgtttcctcgttcacatagaatgtgtcgaacaggtcgtgcaggccgcaatggtcgatgtccgcatgcgtgacgataagcgtgcgctccatattgtcaaagttcgggaacaggctgcgaaaaatcttcagcatttcgtccttgtagcacggaaagccgcagtcgatgaacagcagcttgcggtttttctccagaatatacgtgttgcccccgcacggcggctcgatgatgtgcattgtaaacccgccgaacagactgcgctgcgaaatgcgcgcgcggaagttttcacccttaaagctgtgcagcatttcggcgattttgccgatgtacgaaaacgtcttgtgcggcgcttcgcctttttcgtcaaggtgctgcatcaaaaggttggagtctgcaatgagcgcgtccatatcttcctgcggcaggtgcagggtagaagccagctggtgcgcaaacgaaaggtaaaacaccgtgttatcgagcaccttctggcttttgtcgtagtttaaaacacgcatttcgcacagctttgcagcgcggtctaaaaatgccttcgtctgtgcgggatcctgaatgtaaatgccgacctttaaatcctgatggtcggtgtcgttttcctgcccgctcatgtatgtgatgttaaaattaaagctgtcgatgagctccaaaacgggcagcacggcgctcggtacattcggcagatggaattccagcaaaatcgttttgccagggttatcctcgtttaaaatgtagcctacgtcgtttaaacgcacggcgatggtatcaagctgcgcctgtgagccgctgacctccaaaaacagcacgtgcaggtcaacggctttattgtagctgacgcgcgtgatgttcgcgccggactgcgccacaatgcgcgtagccttcaaaaacgcaccggccttgttcggcagtcgcgtgatgaatgttcttttcatgtgcgcctcttaaagcttgccggcctttacgagtgcggcggtcttcaaaatgcccacctgcgttttggaatcggggatttcattgtttaacaccatctcaacggctttgtcgagcggaatgcgctccacttcaaggaactcgtcctcgtctaagtgcatttcgcctttttgggccacacggcacgcccagatgcggatgatctcgccgcagtagccgggagaggggtacagattgccgagcgaaatgtagttttcgctcgtggtgccggtttcctccatctgctcgcgctttacggcctcaaacgggtcttcgcccttttccagtttgccggcgggcagctccagcagcacttccttgtacggataacggaattggcgcacaagcagcacttcattttgttcggtcagcgccgccacgcacacgccgccgttgtgacacacaacctctcttgcactcgttttgccgttttccagctccacggtgtcgcgcagcaccttgatgatgcggccctcaaactttgtttcgcttgtcagtgttttttcaaagagcttcataaactgtcgttcctttctctttatgataaaaactgcttgattttctcgggaagattaccctactattatataaacattttcttaatttcgcaaggcgcgggcgggattctcttgcataaatcccgcgaatgtggtacattttatcagaaccaaaaaatttctcgcggcggtgccgcgtgttatatcccatttttgaaaggaacatgaatatgaaaacctgcattcgtttgctgtgcgccgtttgctgcgccgcgatgctgctcaccacgaccgcctgctcgggcggcgataaaaatacgtcttccgccacggcagaagcgacccctgcgccggagatcactcctgcgccggaggcaacagcagcccccgaagaagaacccacccctgcgcccgaaggcaacacgtcctccgaaacgggcgaaaatcgccacacaagcaccttgccggtaccggaaacgggcagcgaggaattccgcgccgcgtttgaaaacaaccccatcgatacgcagtatgcggacgatatggaaacggcgggctctgttgcgggcatgattactgcgtgcaacacggcttccgacagctggaaagagcagattgattccgtctacacgcagattttggagtatggcgacgataaaacggtcgaaaccgtcaaagaggagcagtcccactgggtgaacgagcaaagcaccgctttgcaggacatccgcgattccgtatcggaggatgacccccttagggccatcactgtggcggagagcatcatggtctattaccgcacaagggccatcgacctttgcgccgtattatacgatattaacggcacgttggcgttcggctaaaatctaaaaatacagaggatttgtgtatgaaaaaagcattcggcgcaattttgatcgcggttattctcattgtctgcgttgttaccctcacagtgcagcgcggcgaaaacgccatgctggagttcccggagcgccccgcagagggctgcacggtgatgtctcttgaaatcaccgacggcaaagcgcagaccgaagtcatcggcacgtacaacgtaaatgaaaatgtgctgacgatgaacacctcggcgcttgaaaacgcagagcctgccgaaagcggtgaaaactacacatatacgctgccggaaagcatcccgaatttttatttcagcgacaccacgcagggccttttgctctacaagggctatttatacgtggtgacggcgacgacgagcggccagacgctggaaatcataaatctgaaaaccggcaccctcggcggcaaaatctactattcgcagtttttgaaggaagaaatgtcctccgcggcggaataaagcatttttacgaacttaaacatccaccggacgcttttttggcgtagaaagcccagtcgcaggagtttcctgaaaagcgagtaaagcaagttttggaaaaacaaaaaaggtgacacactatggaaaagacccgaaaaacgcgtaaaaacccggtgtattcgctgtttcaaaaaatcccgtctttcggaaaacttgttttggttttagcaatgctttttgcgaatatcccgctgtatcggttttattctgcggctggaacggttcttccgcagcttgtcacgaattttgtgttcgtcctttatattgcgctgtttgtaaatgtgctgtattatgccgtgctgacgtcttatatcgtgcagaaaagcgatgagacgaaaagccacagctgcacggtcgtgtctgcagggtcggccgtcagcgtgatcgtcctttccatcggcatcacgctgtttggcacctttgtgcagcaaaatgatttagataccctgctccggcatagcgactccccgaatgagaactacacggtcgaggtgcgtggaaaccgaaaagacccgtacagcgggtacgacgcggacgtgtatttgattgataacaaaacgaacacgcgcgagtatatcaacgcactcaccgacgagcagcacatttacattaaatggacatcggaaacagaattttatatcggcatgacggattatatgatcaccgataaaggcgtgacatatcaaagacatcaaaattagaacaagaaaggcagcctgcatgcacatgcagactgcctttctttacgaaaaattacttattaaacgggttctcggacggatagggcagggacttcggctggttgtagccgatgtctgctacgccgaggtacttgaagacctcaaacagcgccttgccgtagtgaccgaacgccactgcgccgtggtgcgggaagttcttttcgatgagcacatggcggtagaagcggcccatttccgggatggcgaatacaccgatggaaccgaaggagtgggacggtacgttcagcacttcaccctctgcaacgtatgcgcgcagctgggtgtcggccgtgctctggagacggaagaacgtgatgtcgcccggggcaatgtcgccttcgagcgtgccctgcgtaacctcaatcggcagggagcgcgccataatcttctggtacttcatggagcagaacgccagcttcttggagcaggtgttgccgcagtggaagcccatgaaggtatccttctgcgtgtacgtggtcttgcccttgatgtcgctgttgtagaggtctgccgggacggtgttgttgatgtcgagcagcgtgacggcatcgaggctgacgcaggtgccgatgaactcggaaagcgcgccgtagatgtccacttcgcaggaaaccgggatgcccatgccggtgaggcggctgttgacatagcacggaacaaagccgaactgcgtctggaatgccggccagcacttgcctgcaatggcgacatactcgcggtagccgcggtgatcctctacccagtcgagcagggtgatctcatactgtgcgagcttcggcagaatctcgggcttcatgttgcccttgccgagctctttttccatgtcttcgacgaccttcgggatacgcgggtcgccctcgtgcttattgaacgcctcaaagaggtcgagctcggagttttcttcaatctcaacaccgaggtcgtaaagcggtttaatgggcgcgttgcaggcgaggaagttcagcgggcgcgggccgaagctgatgatcttgaggctcttcaggccgatgatcgttcttgcaatcggcatgaactcgtgaatcatgtccgcgcactcgtcagcggtgccgaccgggtattccggaatgtaaacctttacattgcgcagcttcaggttgtagctggcgttcagcatgccgcaatatgcgtcgccgcggccgtccatgaggtcttctgcggattcttccgcggccgcacagaacataacggggccgtcaaagtgctttgcaagcagcgtctcggaaatttccggaccgaagttgccaaggtaaacgacaagcgcgttgcagcctgcgttctttacgtcttcaagcgcctgtaccatgtggatttcgctctccacgatacatacggggcactcataaatttcggtagcaccgaacttctttgtgtaagcgtcgatcagtgcctttctgcggttgacagaaagggattccgggaagcagtcacggctgacggcaacaatgccaaccttgacctggggaatgttgttcataaagtgattcctcctgtaaataaacgggtgtgtatgtgttttgtgccgaaaaaacggcgcaaacgatttgtatgtacaactcatacacggctattgtagcgcatcgcgcggaaaaaatcaacaggaaaaacggggttattattcgtcttcgtctgtaatctccgggcggatgaactcaaaaatgcacagggcgccggcgtttttgcatactttgtactcctctgccgtgcgcagcgtccaattcacttcctgcatcttcattttgtcgcaggcaatgcggtggctgatgttgttcctgaaatgcacgtcatacgcttcaaagtgcgggcgggtgaggacattcgtccacaagtttctccagaacagcgcgcggaaaaagcccttgcactcctcgtccttgccttcaaagtgacccatcagctgaccgcgcagcacatacgggtggttcttcctgaaccaccgcacaatgtacgggtcaaatgattctacgcagtacgggcctttatagttgcgcagcagctcccacacgagcgggcacagcagatcggcatcgtcgtagtgcttcagttcaatgatgagcggcgttctgccgtccacaagcgccagcacgtcgctgaaaagcggtacgcgctcctcggtgttctgcaaacggtactgctgtaattccttatacgtcaggtcgccgatggaaacatccgcgccgcagacgcgctttaagctgcggtcgtggtgcacaacgaccttcttgtcctttgtcagctgcaggtcaaactctatgccgtagcccgcttccacagccgccttaaagcctgccatggagttttccggcacggaaagatctttttcgtgcaggccgcggtgggcatagtcatattttttcatctcggcaaaatcgccgcgcggcgaagccggcgcaatgcagaaaagccacgccagaaagcccagacatacaacaatcagtacgatcaaaattccccaaatcatttttaccctctactttactttttaagtttatttcggcaccttgatttcttccagctttttgcggtactgcaaaggcgtagcgtcgtattcggtgcggaatacttcgatgaaatagctcatggagttaaagccacagtccatggcaatgtcgagcacgcgcagatttgtggcggtgagcagctccagcgcgtggcttaaacgcacgccgttgatgaattgcaccggcgttttcagtgtatactgtttgaacacgcggcagaaatgtccctcgctcatgccggcggcgtgcgcaagctgctgtacggagacggcagaccggtaattttcctgtataaacgcaatggcggccttgatgctgtccgctgcggcgcgcttagaagcgctgatgcgcgccgacacgccgttttgcaccagtgcgccgaacgccgaaagcatggcggcttttacgggaaactcaaaaaacggcgggcggttttccagcattgtgtacgcggtctggaacgcggcggaaacgctttcgtgcaaatttgttccggctctgatcagccgcggcacggtcagctcgccgtccaaaacgggctgtatgtactttacgcgaatgatgtcatttgcggtgctgcacagcaaatcggggctgaacacgatggcttcaaagtaaagctcctcgccggcttccaccggcacggcggcgtgcagctctccgctgttgaaaaacacaatgtctccggcgtgggcctcaaacagatcggtgccgcactgcacggtcagcgtgccctgcatcacacggaaaagctccatttcgctgtgccagtgacaatcaagcgcgtgaaagcggtcttcgcgtcgaatgcagtagttcatcacgggcatcagcgcgtcgccgtggcggcgggcctcccgcatgcggtcaaattgatttttgtccgtaaaacgcacctcctttttaggctcagtggtcaggattgttataaaagcggacaaattagcggtagactttccaaagcatatcgcttatacttatgatagagcaggcgcgcgaaaagcgcaagtgccaataacggaatttttgaatttttttgaaaggcagtgagctgaatatgaaatttacgaaaggctactggatgaaccttcccggcgtgacgaacacggacgccgtgcaggttcgcgaagtcaaggtagaaaacgatcgcgtttacctctacaccgtgccgtaccacgcagacatgcgcgccatgggcggcccgcttctggaaatgtacatttcctctccgcagccggatatcatccgcacggaagcgtaccactttatgggcagcaaccagaaaatgccggcgttcgagctgaacgacgcacactgcgcactggaggtcgagaacaccgaaacgaccgtgacgatcaagagcggcaacacaaagctcgtcatcggcaagaacccgtgcagctttgattactactataaggacaagaagctgacaagcatcggcaaccgcttcggcaacgcgatgatcagcaccatctccaccccggacggcaactacatgcgcgcccagatgaaccttgacatcggcgaaaaggtctacggcctcggcgagcgcttcaccccgtatgtgaagaacggccagaccgtggagacctggaacgaagacggcggcacctgcaccgaaatttcttacaagagcattccgttctacatcacgaaccgcaactacggcgtgctcgtgaacgacccgggcccggtctcctatgagatctgctccgagcatgtcacgcgcgtacagttctccgtgccgggcgaaaagctcgacttcatggtcgttggcggcgacagcatgaaaaacgtgcttgaaaactacaccacgctttccggcaagcccgcactgccgccggcatggacattcggcctgtggctcacctcctccttcacaacgaagtacgacgaagagaccgtcatgggcttcgtaaacggcatgaaagagcgccacattccgctgcacgtgttccacttcgattgctactggatgaaggaaaacgaatggtgcaacttcgactgggatcgggccatgttcccggatatcgagcaccagctgcaggtgatgaagcacgaaaacaacctcaagatctgcgtttggatcaacacctatatcggccagaagtctccgttgtttaaggaagcgaaggagcttggctaccttctcaaaaagccgaacggcgacgtttggcagtgggatctgtggcaggccggcatgggtatcgtggacttcacgaacccgggtgcatggaagtggtatcagtccaagctgcgccacctgctcgaccagggcgtcgattgcttcaagaccgacttcggtgagagaatcccgaccgatgttgtctactacgacggcagcgatccgctccgtatgcacaactattacacctacctttacaataagtgcgtttgggaagtgcttgaagagtacaagggcaagaacgaggcatgcctctttgcaagaagcgccacggtcggcggacagaagttcccggtacactggggcggcgactgctcgtcgaactactcctccatgtccgaatccctgcgcggcggcctttccctgtgcctttccggcttcggcttctggagccacgacatgagcggtttcgagggcaaggctccggcggacgtttacaagcgctgggcggcgttcggcctgctctccacgcattccagactgcacggctccgattcctaccgtgtgccgtggctgttcagcaaggagggtgaagagaacggcgaggaatccgtagccgttgtccgcaaattctccgagctcaagtgcaccctgatgccgtacatgttctccactgcggtcaatacacataaaacgggcgtgccgaccatgcgcgccatggttctggaattcccggatgacatcccgtgcgaagacctcgaccgccagtatatgctcggcgacagcctgatggtcgcgccggtcttcatgaaggaaggcgacgtcacgtactacctgccggagggcaagtggacgcacctgctctcgaacgaaaagcgcgagggcggtcactggctgcgcgagaactacgatttcttctctctgccgctctttgcgagagaaaactccatcgttgccatcggcgcgaacaaccagcagccggattacgattacggcaaggacctcaccctgcacgttttcgagctttccgataaggcgagcgcaaaggtttgcgacagcaagggcaacgatatgctcagcgtttccgcagtgaacgagaacggcgttattaccttcaagttcgacggcaaggcagagaacctcagcgtgctgctgcgcaacgtggagaacgtgaagaacgtctccggcgcagaagtcgagcaaaatgagctcggcactgtcctgaaggtaaacgcagacctcagcgacgttgttgtaacgctctgataaaattaatccaacacccgcagaacggcatgaaaaaccgccctgcgggtgtttttctgcaacgctttatgcgatcaaaaagaaagcgcagagcacggggaaaacccacgctctgcgcttatctttatcttagaaaaattacttcttgctgttcagatattcctgaatggcagaaaagaccttgtcaacatccaggccgtgtacggcacatgcgtcctcaagggactcgtggatggaggacgggcagcctacgcagtgcatgccggactgcatcagcacataagcgatgccgcggtcataatcaagcatttcgcccatagtggtctgctttgtgatttccatctgaaaacatcctttcttggtatagcatcccatcgggtcgccccgatctatccgtataaatcaaactcccgcaaacttcgcgtgaactctaatctacacgaatttagtatacaataggatatgccaaaaagcaagtgtttttgcagatttttggcatatgccttaaattggaagaaacgacaaaacaggggggaaaattcagtcaacttgcgccttgacgctgctgcgcattttcctttataatcaaggtagaaaaatattaccattttcagaaaggcggatgattttatgaaaaaacgaatgaccgtaatgctttctttgtgccttagcttgctcctgctgttgtccgcctgcgcttcgggcggcagcacggcaaaaaatgcggaaaaagccgcggccgcgttggcggaaagcatgctgaacgcgccgagtgagcctatgcagcgcttcggcagtattttggaaagcggcgaagaaagcgcccttacggcgtacaaagatgcttgggaagacgaaaaagccctgtgcagcgaaaacggcttcacgagcttcattgaagaagtactgaccatgcagcttatggcggacgaaatgaacgagaccgtgaaggtgaccgccgtcaagaccgagccttacgaagaaaaagaccgcgtggtgcgctttacggcggacgtcaccgtgaacgatacggaaaacatgacggttagcggcaaatgtcagtttgatgaagacggcaaagtctcgttcatcgagctcgatacggacgaacttgagatgacgctcatcgcaaacgataacgccgaccccacgcaaaagccgcccgcaaacggcaacgccattacgttaaacgagtaagcaaaagcccgcaaaaaactgcgggcttcattttttgaattcggtatgcgcggcacataaaaccgcctgcaagccgaattcctgtttttaaacataaaaaaacgaacatcctattggatgtccgctttaagtgttggcgccaacctatcgtcccgggccgttgccagccgagtattttcagcacaaacgagcttaacttctgtgttcggtatgggaacaggtggaccctcgttgtaatcaacaccaactattctgtttgccgcctcatctgacggctttgttataataccacatccattctgaaattgcaagccttttttcaaaaaaatttcaaaaagttttgaaaaaactatatatagttaaaatttcaccgatttctctaaatatagaagctgaaagcacaaaaatatccgtatgcacgcggcggtacatacggatatgaaaaacttttttgagtttacgtcgtaaaaacaaggtcacattgcttttcaacgggataggaagtgaagtagaggttctcgagcgggatccatttttccacgaacatcttgtgccgcgcggggccgttgcgttttaaaatgcgtgcgctctgtgtctccggcgaggtcttgagaaaaattttgagatcgtagcgcccgatgagctccgggtgcgtagagtacgagccctctaaaatgttcagcgtctttggcgtgacctgcaccgcgtcgccgaggtccataacgccgcaatcgaacatgcggtaggaaaacgactcgttcttcggaatctgctccagaatatccgacaaaatacgctcccagtgcacgttgccgcccggggtggcgtagcgctccggcgtgcgcatgggcatcggcagataaaaatcatcggcgtggaacaggttgcagtcataaacgctctgcaaaagtgctgcaaacgtcgttttgcccgagccgcacagcccgtcgattgcaaccgtcaccggggctttttccgccgtcaacttatcgatcgcgatgaatgccgacagaaaatccgcatacgcttttttcaccacgcggtatgccgggtgatacgcacggcggtacgcttcactgtggtgcacggcagggcagcccgccgcacggtacgatttcaaaaatgccgctttctcggctttgtcgaacaaatcggcattttcaagctcgtccaaaagtgataaaaacgccgttttgtccgtgggcgtgtcttcggaagacgctttaaacatagcaaaaagtgttttcggtgaaagctcctgcaacgcgctcaagttgatgcgcgcgtactgctcgccgagggcttccgtgtacggtgcatcacggttggcaatctccgcttcctttaataaatattgataagcgccgtcggggtcgcttaaaaagtggccgccgccaaaactcgcctggtacaaaaacttcaccgcgtcctgcacttcggcttcgggatgcgttttcaggtgggcgcacagcgcttcaaacacgcggctcacagcgcagcaagcgccttgtagcagtccttcagcgccgggtacagcttcgtgtacatgcggtagaacgcctcatacttcggcacattctcctcaatcggctcctgcggggcgttgagtcgaataacgcggcggcagccctcctgcacggatggatacagccctgcgcccacaccggcgaggattgcaacgcccagcgccgggccttccttggaaacgaccgtgcgcacggcgcagttatacgtatcggcaagcatctgacgccacagcttcgaggaaccgccgccgccgcaggcgagcatgccgtcaatggaaacgcccatggttttcagcacctccacgctgtcgcgctgggagtatgttacgccctccatcacggcgcggagcatgtcgtacttcgtgtgcatggcggaaagaccaatgaacgcgccgcggcagtccgggtcaaggtgcggagtgcgctcgcccatgagatacggcagataaagcagacggttgcagccgatcggcgaacgcgccgcctgctgatccatcagataatacgggtctacgcccatgccggctgcggtctctttttccgcgccgcagaagttatcgcggaaccacttaagggacagacccgcgccctgcgtcacgcccatcacgtgccatgcgcccggtacggcgcagcagaacgtgtgcacgcggcccttcggatcaatggaaatattatccgtgtgcgcaaacacaacgccggaggtgccgatggttgtaaacgccttgccgtcctccacaacgccggtacccacggctgctgccgcattatcgcccgcgccgccgaccacgatggtgcccgccgcaaggccggtgcgctttgcggcttcttcggagatgacacccgtcacttccggggattcgtataccttcggcaagagtgccttgtcaatatcaagcttttcaagcacttcgtcgctccagcagcgattcggcacgtctaaaagctgcatgccggaagcatcggagacctctgttgcaaagtcgcccgtcagcatgtagcgcacgtagtccttcggcagcagaatgtgcgcgcactttgcataaatttccggctggttgttgcgcacccaaaggattttagatgccgtaaagcccgtcaaagccgggtttgcggtaatctcaatcaggcgctctgcgccgacgcgtgcggtgatctcctcgcactcctttgccgtgcgctggtcgcaccagatgatggagcggcgcagcacgttgccgtccttatccagcatgacaaggccgtgcatctggccggaaatgccgagtcccctgatgtctttgttatcgacgccgctttcggtgatcacggcgtgaatggtatccgccgccgcattccaccaatcgagcggctcctgctctgcccagccgtttttttcctgatacagcgggtattctatcgttttgctcgcgattacattgccgtcttcgtcaaaaagcacggtttttgtgccgctggtgccaagatctacacctaaaaggtaattcatattaacgtcctttcttttcgaaaaatggtttcaaatatatagggcattctgcctccattttattttgaagcattttcccatttgtgtcaagctttttttgttgaaattatgcagactattttaattgaaacgcgcggttttgtatgatacaataaaaaacaagagcttcgtcggcgatttataggggaaaagccgtttgaagcggtcttttggtgtatttgaaaggattgaaacaaaaatggagaaaaaacgatatgacgccgtcgtgatcggcgcgggcgttacgggcagcgccatcgcccgtgagctttcgcggtatcaggcagaaatatgcgtactggaaaagggcgaagacgtctgcaccggcacctcaaaggcgaacagcgccatcgtgcacggcggctttgatgccaaaacgggctcgctgaaagccaagatgaacgtcctcggcaaccgcatgatgacgcaggtcgcggaagaactggatgttccgttccgcagaaacggcgcgtttgtgctgtgctttgacgaaaacgacatgcctgcgttaaaggagctttatgagcgcggtgtgacaaacggagtagaaaacctcaaaattcttaccggtgacgaagcgagagaaatggagcctgcgctcagcgacacggtcgtcgcggcgctgttctgtccgtcctccggcatcgtatgcccgtttgaattgaccttgggctttgccgaaaacgctgagaaaaacggtgttgaattcaaatttgagtgcggcgtgcaaaatatccgccgcgaaaacgacctctatattctcgaaaccgaacagggcgagatcgaaacgcgcgccgtcatcaacgcggcgggtgtgcacgccgatgaaattcacgatatgctgctgccgcacgcgttcaccatcaccccgcgccgcggcgaatactgcctgtgcgacaaaaacgcgggcaatttggttgataaaaccatcttccagctgccgacaaagctcggcaagggcattcttgtcacacccaccgtgcacggcaatctgctgctcggccccaccgccgagaatatcgaagaccgcgaggacacggccacaacgcagagcggccttgcattcgttttggaaaaagccggtatgagcgtgaaaaacgtgccgagccgacagatcatcacatcgttctccggtctgcgcgcctgcgcggacagaggcgacttcatcttagaggaaagcgcaccgaacttctttgaagccgcgggcatcgaatccccgggcctcacaagcgcgcctgccatcggtgtttatatggcggaaatggcggcgaaagcgcttggccttacgaaaaaagaaagcttcacccccgttcgtcacggcgtcgtgcacctcaattcgctcagcgtcgaagaacgcgccgagaaaatccgtgaaaacccgctctacggcagtattgtctgccgctgcgagacgatctccgagggcgagattgtggacgccatccgccgcccgctcggcgcgaaaacgctggacggcgtaaagcgcagaaccagagccggaatgggccggtgccaggcaggcttctgctccccgcgcgtcatggatattctcgcaagagaacttaacttgccgctgacagccatccgaaagaacgaaaaaggctccgaaatcgtgttcgggaagacgaaatgaggtttattatggaaaataaaatcacaaaatcgcttgtcatcatcggcggcggtcctgcggggcttgcggcggcggtcgccgcggcagaaaacgggcttccggctgaagatatcttaattttagaaagagacgggcgcctcggcggcatcttaaaccagtgcatccacaacggcttcggtctgcacacgtttaaagaggagctcacgggtccggagtacgccgctcgttttgaagaacgcgcaaaggctttgcatatcccgtacaagctcggcgcaatggtactgagcatttccccggaaaaggtcgtcacggcagtcagccgcgaagacgggctgttcaccgtggaagcgggcgcggtcattttggccatgggctgccgcgagcgttcccgcggcgcgctgaatatccccggtttccgcccggcgggcgtgttctccgccggcacggcgcagcgccttgtcaatatggagggttatatgcccggacgcgaggtcgtcattctcggctccggcgatatcggtctcatcatggcgcgccgcatgacgttagagggcgcgaaggtgcacgtcgtcgcggagctccagccgtactccggcggactcaagcgcaatatcgtccagtgtctcgatgacttcggcatcccgctgaagcttagccacactgtgacggagattcacggcaaggaccgcgtaacgggcgtcaccatcagcgccgtggacgacaaattaaagcccatcccgggcacggaagagtattattcctgcgatacgctgcttctgtccgtcggtctgatcccggaaaacgagctcaccctcggcgcgggcgcaccgctctcccgcgtgacgaacggccccgttgtcaacgaaagcctcgagaccggcgtgccgggcatcttcgcgtgcggcaacgtgctgcatgtgcacgaccttgtggactatgtttccgaagaagccgcgcaggccggccgtgccgccgcaaagtacgtgcagggcggcagcaaagaaaccgcagagccgctttcgggcggcatcaagctggaagccaagggcggtgtgcgctacactgtgccgagcatcattcaccccgaaaatatgccggatacgctcacggtgcgcttccgcgtgggcggcatctataaaaattcgttcatcagtgtctatttcggcgatcagcgcgtgcagcaccgcaaaaagaccgttatggcaccgggcgaaatggagcaggtgttgctgaaaaaagcagaccttcaaaatattgattttgataccgtcaccgtcacggtggaagcggaataaggagggcattactatggaaacgaaatcgtttatctgcatcaactgccccttgggctgcccgctgaccgtcacggttgaaaacggcgaggtgaaaagcgttacaggcaatacgtgtaagcgcggcgagctctacgccgtgaaggaagttaccgcgcccgcccgtaccgtcacgtctaccgttcgcgttttaaacggtgaacgcccggttgtcgccgtgcgcacgaaaacggacataccgaagggtaaaattttcgactgcatgaaagccatcaacgcagcggagatcaccgctcccgtccatatcggcgacatcgtcatcgaaaatgtttgcggcaccggcgtaaacgtcgtcgcttctgcggacgacgagttgggttaaaagtctttgattaaactttcttcagaaagtttatagggtctcggggcaaagccctgaggcgcgctccgcagagcgcgaaatccttttacttaccccaaaatcaggactgggagaaaccaatgcttcgcattgctataaaacaatccagtgaattgttcgtccgagggagaccctattaaggggtctccctatgaatttgcacggcaaattcataaaagataaaacttttagaaagagagaataaacgtatgaactacaccgacatcaacgccaaaaccgtggacagctgggtgcaaaacggctgggagtggggcaggcccatcagccacgaaacgtttgaaaaagcgaaaaacggcgaatggggcgtctatctcacaccgacaaaaatcgtgccgcacgaatggttcggcgagatgcgcggcaagaaaattctgggtttagccagcggcggcgggcagcagattcccgttttcacggcgctcggcgcagactgcaccgtgctggattattccacggagcagctaaagcgcgaagaagaggtcggcaagcgggagggatacacgccaaagtgcgtccgcgccgatatgacaaagccgctgccgtttgcagacgagagcttcgaccttatctttaaccctgtctccaactgctacatcgaggaattagagcctgtctggcgtgagtgtgcccgcgtgttaaagccgggcggcgttttgcttgtcgggtttgataacggcatcaattacctttttgatgacgacgaaacaaagattacgaacacgctgccgtataatcccttaaaagacgaagtactctataaaaagtcgctggagctcgattacggcgtgcagttttcgcacacactggacgaagaaatcggtggccagctgcgcgcgggatttatgctgacggatatttatgaagatacaaacggcggaggctttctgcacgagcacggcgtgccctgctttgtcgcaacgcgctgtgtgaaaaagtaatagctgaataaaaaccgtaaaaagcacggctttcccgaaaaacggcggaaaagctgtgctttttaaattttgccgcaaaaatattttttgaaatcgcacattcaaaaataagagcataaatgagaaaaacaaagaataagcgagattggaattcgcagcttaaaaaaccgcaaaaaagcgcttgacaagccgtttttcgtgtggtactatcatttagcgcccatgggaaagctatgggcattttcagagatttcgtatcgcagcgcacaaagcgtttgccggtaccgagataatttaaatcaattttggaggtaaacgctatgtccacttatatggccaaggctggtcaggttgaccgcaaatggtatgtaattgacgctgcaggcaagccgctcggccgcgttgcagcacaggccgcagttcttctccgcggcaagcacaagcccacctttaccccgcacgttgactgcggtgaccacgtcatcatcatcaactgcgctgaggctgtcctcaccggcggtaaggctgaaaagaagtattattatcatcacacgggttatatcggccacctcaaggctgtccgttatgacaccctgatgcgtacaaagccggaaaaggcgatggagcttgctgttcacggcatgatcccctcgaacaccatcggcagagctgcagaagcaagacttcgtgtctacgccggcagcgagcacaagcacaaggcgcagaagccgacggcttgggaactttaataggaggtaaacgaatatgtacgataaggcaccttatttctacggcaccggcagaagaaaaagctccgttgcacgtgtaagaatttaccagggcaccggtaaggttacgatcaacgaccgcgatatcgacgattatttcggccttgataccctcaagacgatcgttcgtcagccgctcgttctcaccggtaccgaagagaagttcgacatcgtttgccgcgttgcaggcggcggtgttaccggtcaggccggtgctatccgccacggtatctccagagctctgctccagtacgattccgagaacctccgcgctacgctgaagaaggccggtttcctcacccgtgacccgagaatgaaggaaagaaagaagtacggtctcaaagctgcccgtcgtgcgcctcagttctccaagagataacaggcccgacaaaccaattcaaaaatgctcaaaaagcccggaaccatgcggttttccgggctttttcctttccaaaaagtctgttgtcctttgtccgattttggaaggatttgaccttgcctgacccggtttttcttgattaataatggggcaacaggccctttttgaccccgttatgattaaaaaatggggcaactgcgagccgaaatcggggtgttttagagggcattttccccgtcattttttcgattccatgacggcctttgtgaacggtttttcttttgaaggggatgtcctgatttgtcaggatttgaccaaaccgaatccagtttatcttgtccttctgagttgccgctgctgtgtttcaagtggatgaactctcgcacatttgcggcgcagtgttccttccatatatactgaaagcgtaaaggaggaacgccctatgaaaaaacggaaattcaagatatacctcacccccgccgaaaacagcattgtgatccagagccttaatcacctgcgcaatactatgctccgtgaaaaccgggacaccggctgcctggatgaacttctgctcaaagccatgtgcgccccggtgaagaagatgtaaaattacatatcgctgccagatgagccgcttattcttttcagaaagagtaagcggcttttttcatgtccatctttcggattttctcatacatagccgtccgtcttgccaacgggcggctaaatctaagaagaaggaggacatgaaaatgccggaacaaagaagccgccccagggatggccgcgtgatcgcgctggccaaccagaaaggcggcacaggcaaaaccaccacgacggtgaacctgggcattggtttagcccgtctggggaaaaaggtactgctcattgacgcagacccacagggcgacctcaccacctgcctaggctggcaagaccaagacagcctgcccaccaccctggccaccgttatggaaaaagtgatccgggatgagccattcaccacggatgagggcattttgcaccacagcgagggcgtagaccttatgcccgccaacattgagctgtccgcgctggaaatgagcctggtcaacgccatgagccgggagtttactttgcggacctatgtcaatgaagccaagaagcactatgacgtggttctcattgactgtatgccgtccctgggtatgattacgatcaacgccctggctgcggcggacagcgtgattatcccggtgcaggcccactatctccccgccaagggcatgacccagcttatgaaaaccatcaataaggtgaaacggcagatcaacccggctctgaaggtggacggggtgctgctcactctggtggatgggcgcacaaaccttgccagacagacagcagatacactgcggcagagttacgggagcgtgttgaaaatttatcgttccgagattcccgtagccatcaaagccgcagaaatcagcgccgcaggcaagagtatttacgcctacgacaaggggagcaaggtggcccaggcttatgcggatttttcaaaggaggtgctggcggatggcgaaaagcaacgggctaaacttcaatcttccctcagtcgatgacctgttttccacggaggaagagcgggctgaggcacggcttgaaaaagttgtcaatctttcgcccacggaaatcagcgacttcccgaaccacccgtttaaggtgcggatggacgcagctatgcaggaaatgacggaaagcgtgaagcagtacggcgtattggtccctgccctggtgcgccccaaaccggagggcggctatgaaatggtggccggacaccgcaggaaaaaggcggcggatttagcggggcttgcgaaaatcccctgtattgtgcggcagctcaccgatgatgaagccacgattatcatggtggactccaacttgcagcgggagcagattctgccctcggagaaggcgtttgcctacaaaatgaagctggacgcattaaaacgacagggtcagcggacggatttaacttcttctccactggataataagttaaaaggcgttacagcagcccagcagatcagcagggatagcggagatagtcaacctcagatttataggtatatccgccttacccaccttatcccggaaattctggagctggtagataactcagtccttaaagaccaggaaatgctccagattgccatgcgccctgcggtggagctgtcctacctgcgaaaagaagaacaggccgacttgttcgctatcatggacgagatggactgcaccccgtcccacgcccaagccatcaaaatgcgacagatgtccgaagccaagactggaggggaacggctggccaaagacgcccttgtttccattatgaaggaggaaaagcccaatcaaaaagaacagttcaaaatcccaaaagaaaaaatcagccggttttttgcgccggggacgcccacgcagaagatcgaggacaccattgtcaaggcgctggaactttaccgcaaacgccagcgcagtttagagagatagcccactcacaagggggaagtgcgcccatttgcagggaaacggcagcttgtgccggttccccctctccacacctcaccccttccaaacaacctaaacagcctaaaaaaagaagatatttggggagcctggatgtatatagaaagctccggcctcttttccacaggcagacatcgggctgcgaggaaaaccgggcgggcctctcttttttagacagtaaccaacacaagccgcagcacatcggaaacggtgtgcttttttgcggccatttcaaggaggtaacacgatgaaagcattgagaaagcccctgtccctgttcatggccatgctcatgtgcctgggcatattcgcagggacgggaaccacagcgtttgccgcaggggaaaccatgacgacgtatatggtggagttcccccgtgccagcgaccccaacaaggcaggctggggacattccgctatgaatttcttgggcggatggtctaccggcgaaaataacggttttaccatccacacgcaggattcctttaacgggaaagtcatctactgtatcgaacccggcgtcagcgttcattccggcgaccagtttactggccggggcgaggatttctgggatgattacccgtccgatctgaaccccactatcccaccggacaccatcaaggaatatatcgggcggattatgacctatggatggcagggcaacgccagcacctcatggatgaccgatgacccggaggacgccagcaagatggccggggcaatcgccacccagcttcttgtctgggaaaccgtcgtaggcgagcgcgacagccagtttaaccatgtggacgccaacgcccagggcaagaacaatatcgcggaatataccagcccggagaatcccctttacagcgagatcttcagccagtattccgctattgagagcgcggtaaaacgccataccatgctgcccagctttttcagcagcaccgcagacgccggggcctacgagctgaaatgggacggccagcagtattccctcactctcacggataccaacggcgtgctgggagattacacctttaccagcaatattaccggcctgaacttctctgtggacggaaaccagctcaccatcacttccagccaggccatcaaaggctctgtaacggtaaaagcagaaaaaatctccgcccagcgcagcggcgtagtggtatggacggatgggattatcggcggcggcaagcaggactttgccacctacggggaaaccgtgtccgattatatggtgggctatctgaacctggaagtaaaaaccggcaatatgaagctggtcaagacttccgaggatggacaggtagccgggatcagcttcaccattaccggcgaaggatacagcgccaccaagaccaccaatgaggcgggcgagatcgacatctccgacctcaatcccggcgtttataccgtaaccgagcagtcgattgacaaatacgaaccccaggaaagccagcgcgtgaccatcgtcagcggccagaccgccaccgtgacttttagcaacgtgctcaaacgcggcagcctggaagtgacgaaaaccagcgaggacgggctggtggagggcatgaccttccatctgtacggcacatccctctccgggcagccggtggatgagtatgcggtgacagacggaaacggtgtggcgcgctttgaaaacgtgctcatcggcacgggctatgtactggaggaggtggatacccccatccgttatgtggtgccggattcccagacagccaccatcgagtggaatgaagtgacccacaagagcgtgaacaatgtcctcaaaaagttccgtgtcactgtcaccaagagcgatgtggaaacgggcgcgccccagggcgacggttctcttgccggagcaacctatgggttgtataagggagatacactcatcgacagctataccaccgatgagaacggccagttcaccaccggatattacgtctgcgattcggactggacaatccgtgaaatcaaccccagcgagggctacctgctggattcctctatccacaaggtaggcgcggaaccggaattgtatgagattgagctgaacgacaccgccaacgatgtgacggagcaggtcatcaagggcgacattgccataatcaagcataccgacgacggggaaacccagatcgaaaccccggaatccggcgcggaattccaggtgtttttgaaatcagccggcagctatgaaaatgccaaggaatctgagcgcgatgtcctcgtctgcgatgagaacggctttgcacagtcgaagaagctgccctacggcacctatatcgtccgtcagaccaagggctgggaaggccgcgagctgatggacgattttgaagtgtatatcgctcaggacggccagacctaccgttatctcatcaacaacgccaactttgagagcttcatcaaggtggtcaaggtggacgcggaaaccggcgtcaccatcccctatgcgggggccgggttccagatttaccgtcccgatggcagcaaggtggaaatgaccttcacttacccgacgccgaccaccattgatacgttctacaccaattccgagggctatctggtaacgcctgaaaagctggaatacggcgcgggatattccctggttgaagtacaggccccctacggctatgtgctggacagcaccccggtttactttgatgtgaccgaggacaattccagcgtggaaggcggcgtgacggtgattgaagtcaccaagcccaacatggcccagaaaggaatcatcaaagtcagcaagaccggcgaggtattttcctctgtgacagaaaacgagggcgtttaccagccggtgtatgaggtgcagggcctgcccggtgcggtgtttgaaatcaccgccctggaggacgtctacaccctggacggcaccctgcgctactctgcgggcgaggtagtggacaccatcaccaccggcgaggacgggacagcccagagccagcccctctacctgggcaagttccaggtgaaggaaatccagttccctcacggcatggtggataccggcgagaacgtcaccaacgtggagctggtgtacgcaggccaggaggtggaagtcaccgaaacctctgccagcttctacaaccagcgccagaaagcccttgtgacgcttgacaaggtgctggagcaggatgaaacctttggcattggcatgaatggcgagatctccgccgtgacctttggcctctatgcccaggaggacatcaccgcagcagacggttccgtgatcccggcagacgggcttctggagatcgtttctgtgaatgagaacggccaggccgtttgcagcaccgacctgcctttcggcagcttctacctgaaggagctttccactgacagccattacctgctgaatggcgaaaccttcccgttcacctttgagtacggcgggccttctgttgccgtggtagagatttccgctaatgatggcgaggctgtcacaaacgagctgatccgcggcgaaatcaagggcctcaaaaccgatgagaacggcacgggcctgggcggggctgtaatcggtctgtttaagtccgatgaaaccgagtttaccgccgaaaacgcccttgccaccactacctcagcggacgacggcagcttttctttcaccaatgtgccttacggtgattgggtgctgaaagaactggaaagcccggaagggttcatcctctccgatgaagtgattcccgttactgtggaggaagatggacaggttgtagagatttcccttgccaatgagcgtgtgtatggtgatctgcggctcaccaaggtggataaggattatcccgataacaaattgacgggcgctgaatttgaagtgtaccgcgataccaacggcaacaaagagctggacgagggtgacgagctgctgggcaagctggaggaaaccagcaccggcatttacgagatgtcccacatcctctacggcggcgtgttcgtaagggaaaccaaagcgccggagggcttcctgctggatgaaaacgcctattatgtggagatcaccgagaacggcaagatttacgaggtagagaacgaggccgggattggtttcaccaacatggcccagactggctccctgcggattgaaaaaacgtccagcgacggcaaggtggagggcttctccttccgcgtgaccggggccaacggctacgaccagaccttcaaaacggataaaaacggcgaaatcttcatcgagggcctgcgcgtaggcgattacaccgtgtccgaggtatcggatggggccagcgccaactatgtgctgcctgcggataaaaaggtgacgattctggcggataagaccactgtggcgcaaatgcacaatgagctgcgcgacaccccgaaaactggtgacgacagcaagccgtggctgtgggcggccctgatgggcgtatccgctatgggcgctgccgccctggacgttgcggcctatgtgggcaagcgcaaaaaggacaaccataccgcaaaataacggcggtttgaatctgtgtaaggaggaatgattttatggaactgaaagcgattattgccattgcgctggtggtattcatcatcggcggcctgattttcctgaaagtcagaagccggaagaagtaaccagccaggggcggccatgcggggccgccccttttacataccaaaaaagaaaggagctttgcagatgagagaacgatttgaacaacggctgttccgcatctttgcccaggctggttactccccggtgcagcttctcaccatcaccccggaggagatggtggaggtccccggcattaccgttcccaacatccgggcggtgctgtgcgtccagaacaaggtgctggcagaccggaataaagtccgcagcggcaggctggtggaggaattgctgaaagaagctgaagaaagcaggtgttgccatgaatgaactgcacctgctggacatactggcggctcggcatggctgtttcatctccgacttaaatctttcgcctatcctgcggcgggcggcccttttggacctgtgcaggatggatgagaacagctacccgctgtctcaatggcaggacacggtgcgctaccttaccggggatgaacgggattttgccagtgtaaaggaaatcaaagtatttattaaacaggaattggaggcagagtgatgaacgatgattccacagaaaaacgcatggccggtgattatgagattatccaggcggtgcagattggcgaccgcgaggttgtcctgggggaaaatccgcaggatgaaaccggcatgaagtatatgtgcgccttttgtcggcaaaacgccttatttgcagaatacagcgaagtgatggccagtgatgatttcccggagattgtggagctgttcggccagcgggttgccgagcaagcgcagaaaacccacatagaactcaataagccccgcatacagggcatagacgaccgccccattacagcggagggctgcatccccatttcctatgaggatgatctgcacgggaaaatcgtggtgataaagccggaggtgctgcgccgggaataccgcagggccactcgccagctcaagctctgtatgggaggctttggggcttccccgcacagcagggggtcagcctgttactgcgttgacctttatactggaaaagaaagccgctatgagcgcatggacgtgctgggaacgatacagccggaggaccttcccggctgggccaagcatggccttactgcgattcagcaggaacaggccaaaaagaaaaccgcaaaggagcgtgagcgatgatggattacagagaaaacgccggatatatcattacggattcctgtcatgtgggcgacagcgaatttgtcttgggtgttcatttgacagcgccccagcagtttgtcacctggaaatgtagtaaccggacggactacgattggggccactatttcagcgacctgttttccgcgcagaaggatttggtggcgcgggcgcaggaggaggtgcagtgcctggaggaacagcggcaaaacaccattgcgccggaggccccgccctattccccatggggcaaagtccaggagtgcgaaacgctctgccccggcgtttattccgtttctaccccagggcatggcggcgttatggtgcggcgggagctggcggaaaaggtattccgaaaagaagcgatgggctgcggttttatagcgagcggttatctttgctttgaggaagataatgacgcgcaggtggctctccgggagctgatggataaaaagatgatccaggctccggtgaacgggcgctttgcccccggtgcgtatgaggctgttatcaatagcagcgtgcaaattcaccaccccgaatattggcaggcaagggaaaaagccatatcggagcaaaaacgacaagcgaaaaagaaaggacgtgagcgataatggaactgacaattaccagcatgaccccggcggatcgcctgtatgcgtacaaccagagcagccagcttgaagggcaaaccggctgtatcggccatctgcgcggggattttggcgctggaaaagagttttacacttcctggttcgaccatcggagggaatacaagacggacgagtttaaggcggagcttgatgaggtggtcaacactctgcgggagaagaatgggctgctctgtacccgtgacagcatgaccaggttttgctatcagaacccggaggctgagtttgagggaaactactgcgccgagtatggttttaaggtgcagacgccgcagcacacctatatgctccggtgcaatcccaattatggagactacaacttttacctctacgcctacgtttcccgattcctggaacaccacatggaaaaggccaaacagggtatccggtttatcacgcccggctacaaggagctgttccgcattcccgacggcgaccacatccgcattttcactggcggcggagaaacccgcgaccgcacctgccgggtcatcgacgaaacccattttgaaaccagcggcgggtattccagcgccctgtatcatatctgcgaatttgcggagcgattggagcaaactcacgggagcgtgatcccgctgcgttcttctctgccggtgcagtgttttagtgtactgccctcatccggggagctgattcttctgaccaggggcgaaaaaggctacagcccttgctatgatttttcaactcctgacgctcaacagaaccgagagtttgcagacgaccgcaatgtgaagaatggcgttaccaaagcacaggaggccgccatgcttgccggctccatgcttggctggcagactcccgccgccgatcccagaaactatgacgagcaggggcagcctatcaagcccaggcagaaagaccggggtgaagcccgatgaaggaggaaagacacgttatctggagcaattatggcctggactatgaggattggagggatgacctggaggcggactacccggatttatccgaagatgagcgcatttccctgatgtatgagatcaatggggattacctggatgatgaacgcgccaacctcaatgtgcagctctcccaaccgattttagtcgtaggcgacctgggcctgtggaatggtcggcgcatgggatataaggaaatccccagcggcaatatccgggactgcctgtattccgatacggattattccacctggtatgtggaccggctgggtgatctgcggtgcgacgccatccaccatgatggcacgaacttttatctttaccgcgtttacaaggacagcgccagcccttctcaaattgaactgctgaaagaaaaactatatcgcggcattgcaacccgcgccgatattacgagagtgacccgcaggctgggcgacgacatcgccaaagtctacgggttttccattccccggcagcggcaggccgtcgccatggaaagatgaggtgataaaaatggcgtctttaccgcccgtaaaactggatacgcatgaggactggttcaacttgctgatgacggttctccatcagcaggcggaacagaacccctatgaagaataccgggagatggctcaaaagctgatcgaccagtttatgcgctatgggaggccctttgttgacagtgaccatgcgccctgcgtggcgcttcggatgtacccgaaggaggccggaaataccatctggctgttgctgctctccctgtgcaatcaatatgaccctgataaggattacagcgcagaactgaaagctgcgaaaaaagaataagaaaaggaggggcaaccgatggcgatacgatataaagccttgacggagctgtaccaggaaacgcagcgcagcgtgacagctcctgaccagtggcgggcgtttctggcttctgtctgccgcaactaccggctttctttcgatgaacaactgcttgtctacgcccagcgcccagacgccaccgccgtcctggagatcgagcgatggaaccggcaatttgggcgctgggtaaaccggggcgcaaacggcattgccgtttttgacggtgaacacaatggaaaaccccgactgaaatactactttgatatttccgatacccatgaggcccggttcccccgccccgtccccctttggacggtgcgggaggaatatgcgccggacatcattgaaacgctggaaaacagctttggagagctggagcgcaaggaggatttgggtgaagcactgctctctgcggcaaagaacgccgtggaggacaatatgcccgactacctggcagaattgaaaaccctcacggaaggcagctttctggaagaactggatgagctgaacctggaagtggaataccgcagggcggtgcaaaacagcattggatatatgctgctggtgcgctgcggccttgacccgtctgaatattttgaggacatggatttccgggatgtgacggactttaacaccccgcagacgttgaacgctttaggcgtggccaccggggacatctcccagatgtgcctttccgccatttcccgcacggttcttgccctgcaaagacagccccaaaaagaaaatcgcacatttgaaccccagcagaaaaaccagtatgctgtaactgaacaggaaaacacacagctggaaaggagttttgaatatgaccgagatcacttacaccaggcagggcgactacaatctgccgaaccttctgccgccccaggaggagccggttccccatgggaaatacgcattgcttcggaagaaattcctcaaggagcaccgcagggtgacgtacaccaacctgctgaccagcggcaagctgaacagccatctggcggagatccagcagaccgcccagcgccggatggagcagatcgtggcgcagatggccaagaaccagggcgtgacagaggaactgaaagccagcgaccagatgaagtgggtgcagatgatgagcaacctgcagaacgcggcggaggaaacggtgctggcggagctgatttacagctaattgatgaaccggaagaaagcgcaggtggcgaacagctccctgcgcttttggatgaaaagcagatcatggccatcatcgccaacaaagatgatgacctgaaatataagaaaaatcagatcgagcttttcttttcggttcacagcgacgttcaggaacgggccgactacctgaaatccgcttatcaggaccggtacactgagatcatcgctgacgggcagcgcctgggatataagccccaggagaatggcctgctcatgtgggaaggctcttacccatcccgcaccagggaatctgtattttcctgggaagtggtggcaggctggaccgcccagcttattgacaaaaaagaatacttcattcagacggacatcccgcagctccctacccaagagagccagcagatgtccctttttgattttgcggcgtttcagcagccaacccaggccgagggtacggccaaaccatccattttccctcacccggctctgcctcagcaggtaatcgacgaggcgctgtgcattggtgctaacgaccagaacagccgcctcatcatctgcgcctatttcaaaaaggataagccggacaatgccaggttcctggcagagcactatggagagaacggcgctggcttttatctggatggccgacagtatgccatctggtacaacgccgagggaatccgcattgcccagggcgaaagcgcccagcgttccagcgccaccctcatcccctgggaacaggcggcggcccgtatccgggaactgctggacttgggccgatatatgccccagagcgagcttgaccgggtggatgagtatgagcgccagcaacgggccgcgcagctatggtatctccggcaggattttgcagaaggcactgccgacgcgggctatcttcccacggtgaataccatttacggtaaaaatcatgggtttccagaggaaagcgccgccataagcgatttgttaggccatccggaggggctgcagaacctgcgggatgagctggagcagtttgtccaggcatacagagagaaccgggaactgctgcgattccatttccaccgtccgcaaaaattgctggagcagctttccgacctgcagcgggaaccgctgcactttaccgccgccgaagggtacgccccccagcggcgttttttcatctccggggacgagatcgacaaccttctccggggtggaaaacgcagcaccgattaccggctggccgtgtattctttctatcgcaaccacacagagcgcaaggaacgggagaatttcttaaagcactaccacggcgagtacagcggccattccagtgggaatgacgatgtgacctaccagctcagtaaaggcgtttctttcagccacggcagtatcaccgccccctacgccaaggtggagctgaaatggaacgccgtggaaaagcgcgtcagcgccatgatcgcccaggggcggttcctcaccgatgaggaccgcgccgccatgccgcagtatgagaagcaccagcttgcccggaatatccgcactttctttgaaaacgtaccccaggagcagccccacccctatccctttggctttgactattgggacgcggtgaagctcatcgagccgcagcttgacgacccggcccgtgtggaagaaatctatcagatgatggtccccatttgggaggccaccccgcaggatgacaggatgtacgccctgcgccagcaggcgtttgaaaacctcactgccttccggcagggaaccttcacgctctttgcagagcacaaggagcctgtggttcccaccatgccgcaagccaaagcctacgacctgggctacggctatttgggaaacggcgtcacggtgtggaaccggctggaggaggaacacggtgactacaaaacggttgcccacatcgccccagaccgcacggtgaccttctacgaggaggaaatgccccaggcagtgcgggaggaaatccagcggattgctgacacttcggaaatgaccatttccgccacccaggacgcgccggtgttcaccgtgccgcccagggcgcaggaaccaccccaaaaagaagaaccggtagacccctacccgaagctggccgcccaggtgctgcgttttgtgggagagtttgatggttcccgcatgggttatggtgaggatgacgcccaggcggtggaaaatatcgcccggcagctccatgaccccgttcagagagaggaaatccgcagactgcttcaatccttcctggaccatgcggacctggaagaagaaatcgcggtggacatcaccctctgtatggagcagatcgcggagctgcccccggcccttaccccggaacaggcgcagatagaagaaatcgccggttatctggaggaggccggatatgcggtatccagcgaactggtcgaagaaggtttgatggattaccgtgcccatggcggcaaaggtaacagccaggatgttgccgacttcattgagcgcgagtttttgtccgaggagccggaacctgcttcactggagattgccaaagaatttatcaacgatttctgcgaggccgagtatggcagtccagccgatttcagtgatctggaaaaggtgggcattgcctacaccactgttacggatgaggaaattcccatccaggtcaatgccgacttggtccattaccgcattgagcgttatctggacgggcagtttttggagcgcaggcagtatgagagcctggatgaactcatccaaaatgagctggccgaactggactttgaccaactcacctctgtggaccaggactatttcaatggaaaataccctcccgacatagagccatacatcttctgcgagtggagcgaaagccccgtgtttgaagatggaaaacgctacggtatccgtgaatttgacaccctgatgaaacaggcggatgaggagcaggtggccggtgcaaaggctgctcttgaaaaatacggcacttggcaggtgtggtacgaatccgatgacccagaaaatgctcggttcctggggtatgacaaggtgaaatttaccgtggtcatgccagatggcaccacctacaccgagcgccaggatattggggacggtgacgggggcgttctggacttcctcgcacaatatcccaagtaccaagacatccttcccttgttgcagcaaagtacaccaccacaaaatgattatatgcttttaagccgcctgaaagccgactgcgactatttcttgggcgctggcgggcgggcagaaaagcacctgtgggctgggaacgtgcgagagcaaatcgccaaaatgcgggaactctatgacgccctgccggaaaaaccggaatggctcaccatggaggacatcgaccgctatgcccagcgcatggagccgccttacgaagtggtggtgtaccaccactttgaaaatggctttgatgaacggctggattaccaaacgctggcggaggccgaacaagctgcgcagaaatatgtggccggcactatggagggcgaggatggctttgcctatgatggcgcgggtatctatgaccttcaggagaacagatggctgcgggtttacgggaacttccctgatgaacgagccattgagcaggcaaaacaagcccctgccgcagaggaaccgtcagccagcccagagcaggccgatttacagcctaaaaaagaagaagcactcccactgccgccgaagcacccccgccgtgagcgcattactttcacaaccctgcacccggaggtccccagggatcagcgccatgatttccacatcaccgatgacgccctgggccacggcacccccagcgagaaatacgcggccaatgctgccgccatccgcaccttgaagcagatcgaagctgaggaacggctggccacgcccgaagaacaggaaatcctgtcccgctatgtgggctggggcggccttgcaaactgctttgaacaaaccagcccccattatgaggaactgaaatctctgctggattcggaggaatacgcagcggccagggccagctccctcaccgccttttacacgccgcctgtggtcatccggggaatctataaggccctcgctcagatgggctttacccaagggaacattttggagccatcctgcggcaccggtaatttccttggcttgctccccacagatttggcgggcagcaaagcctatggcgtagagctggattccatttccgggcggattgcgggccagctttaccagaatgccaacatttccgtaaacggctttgaaactgtgcaaatgcccgacagcttttttgatgtagccgtgggcaacgtcccctttggggatttcaaagtgctggataaacggtacgacaagcaccactggctgatccacgactatttcttcggcaagacgctggacaaggtgcggctcggcggtattgtggcgttcattaccagcaaaggcactctggacaaggaaaactccagcgtccgaaagtacctggcacagcgcgccgatctcattggggccatccgcctgccggataacaccttcaagcggaacgccggaacggaagtgaccagcgacatcattttcctgcaaaagcgcgaccacatcaccgatttagaccaggattgggtgcatttggacaccgatgaaaacggaatccgcatgaaccgctatttcgtgcagcacccggagatgattttgggcgacatggtgatggaatccacacggttcgggccggacagcgcctgcaaagcccgcgagggggaagatttatccgagcagcttgccaatgccatccagtttttgcaggcggaaatcaagccctatgagctggaggagctggacgaggaggaagatcgctccatccctgccgaccccacagtgaagaatttcagctacacgattgcagatgggcaagtatactaccgagaaaacagtctcatgcacccggtggaagtctccgtcacggcggaaaaccgtatccgtggcatgatcgagctgcgggaatgtacccgcaggcttattgagtaccagaccgaaggctacccggatgaggatattgcagccgagcagcaaaagctcaacgccctttacgacatcttcaccgccaagtatgggctgctgaacagtcgcggcaacaagctggccttttcggaggactccagctactgcctcttgtgctctctggaggtgctggatgagcagggcaacctaaaaagaaaagccgatatgttcacccggcgcaccatccggccccatgtggctgtcaccagtgtggatacagccagtgaagcgttggcggtgtccatttcggaaaaagcccgtgtggatatggactatatggcagagctgtcgggtaaatccccggaggaactggaaaaagagcttgccggggtgatctaccgggatattcgctgtgcggagaacccggaggacatcctgccttctttggcggatttgagccgctatcctcttgtcacggcggatgagtacctttccgggaaagtgcgccaaaagctgcggatggcaaaagcattcctggaagtggcccctgacaatcagaaggaaaccgcccgcagaaatgtggaggccctggaagccgttcagccccaggatttgggcgctggagaaattggcgtgcgcattggcgcgaactgggtgcccatcgaggtgtaccagcaattcatggtggagctgctcacccccaattactatgtgcgggatcgtattaaaatcctgcgctccgaagccaccggccaatggagcatccgggagaaaaacgccgaccgcagcaatgtgaaagccattaccacctacggcaccaagcggatgagcgcctaccacatcttggagcagaccctaaatcaaagggatgtgcgggtatttgactatattgaggacgagaacggcaagaaaaagcctgtcctcaacaaaaaagaaaccgcgattgcccaggaccggcaggaactcatcaagcagaagtttgccgagtggatctggaaagacatcgaccgccgggaactgctgtgccgtgtttacaacgaaaccttcaacggcgtccgcccccgtgagtatgatgggcggcacatccggtttgagggcatgaacccggaaatttccctacggcctcatcagatcaacgcgattgcccatatcctttacggcgggaataccctgctggcccacgaggtgggggcgggcaagacctacgagatggtggccgctgccatggagatgaagcgtttgggcctttgcaccaagtcgctgatcgtggtgccaaaccacatcaccgagcagtgggcggcggaatggctccagctctatcccagcgccaacattttagttgccacgaagaaagattttgaaacccagaaccgcaagaagttttgcagccgcattgccaccggggactacgacgccatcatcatcggccacagccagtttgaaaaaatccccatgagcctggagcgccagcaggccattttggagcgccagattgaagaaatcctggaaggaatcgagcaggccaaggcacagaaggcggaacgctacacggtcaagcagatggagcgtacccggaaatcgctggagacaaggctggccaagctcaacgaccagagccgcaaggatgacaccgtcacctttgagcagctcggcgtggacaggctctttattgatgagagccattattttaagaacttgtttttggcgacaaaaatgcgaaacgtgggcggcattgcccagaccgaagcccagaaatccagcgacctgttcatgaaaacgcagtatctggacgagttgaccggcgggcgcggcgtgatttttgccaccggcacccctatctccaactccatggtagagctttacaccatccagaggtatttgcagtacaggctcctgcaggagatgggccttgtccatttcgatgactgggcggggagcttcggagaaacggttacagccatcgagttatcgccggagggcaccggctaccgagccaaaacccggtttgccaagttttataacctgccggagctgatggctgctttcaaggaggttgccgacatccaaacagcggatatgctttgtctgcctgttcccaaggcaaacttccacacggaagtgatccagccctcggagcttcagaaagagatgataagggggctggcggaacgggcagagaaaatccgtgccggtggggttgacccccatgtggacaatatgctccgcattaccaatgacgggcggaaattggcgctggatatgcggctcatcaaccctctcgctgccgacgaccccaatggcaaggtggctgtctgcgcccggaatgtgttccgcatctgggaacagactaaagaaaaacgctctgcccagcttgtattctgcgacctgtccacacctactaccgatggctctttcagtgtttatgacgacctaaaaaagaaactgatggacgccggtatcccggaagaagaaatcgcctttatccacacggcagacagcgaagccaaaaagaaggagctgttttccaaggtgcgcgccgggcaggtgcgggtgctgctgggttccacggccaaaatgggcgcaggcactaacgtccaggataagctcattgccctgcatgacctggactgcccctggcggccttccgaccttcagcagcggctggggcgtatcgtccgccagggcaatgaaaatgaggaggtggaaatctatcggtatgtaacggaaggcacttttgacgcttacctctaccagcttgtggagaacaagcagaagttcatcgcccagatcatgaccagcaaggcccccgtccgtgtggcggatgatgtagatgaaactgccctcagctattcggaaatcaaggcattggccaccggcaacccacttattatcgagaagtgcaacctggatatggaggtggcgcggctcaatatgctgaaagccagccacttgaaccaggtgtacgctctggaggaactggtgtatcggaaatacccggaggaaatcacccagctcacggaacggatcgcgggctatgagcaggatgtggcgctggcggcggcccaccccaaggcccaggagggcttctgcggcatggaggtggatggcaggcactacaccgaaaaagagggcgccggcaaggctatcattgatgtttgcacccgtatgacaggttccgacgctgttcttttggggcagtaccggggcttttccatggtgctggcttatgatggcaggagcaacgagtatcggatcacgctcaaaggcactctttcccatacggtgacgctgggggcggatgtgttcggcaatatcacccgcctggacaacgctctggaaaaccttgcaggcagcctgcaggccgagcagaacagcctggaggaaaccaaggcccagcttgaaaacgcccgcacggaattggctacaccttttgcccgcgaggaggagctggcggagaaaacagcccgtttgaaagagctgaatattctgctcaacatggatgagaaggacaaaacattgatggacgataccccagacgagggcgaggatgtgcctgcccggagggttgcggagctggcacggtaaaggaggatacgatgaccaacgaagaattaaataccaggctctatgagaaaatgtttgcggaacaggagcagttccgggattggctgctctcccaaccgccggctgagattttgaaccatgcctatgagtacacggtgcgggaggacatcctgatgtctcttgaataccacgatctggaggatagtcaggccagggcgctgctgaaatctgacaagcccttgaagcagatttttgagaggtgggagaaccaggaaacctcttatatggatacggtatgggatactgtccaggaacaggccagggccgccgaagccaaacagaaagccaaagcgcagaaagaaaggtgattgcacatttgccattgcgctgcggggcaggtatagtataataaaaatcgtgataaggggtgatgatagatggacgatgatagatggacgatagctactgcctgctcccggagcgcatttccgagcagttttctgaaatcgacagcgacatcgtgatggatttggcggctgccagcccggaatataccgagttgaaggcccagatggaggaactgaaacgccaaaatcttgtgattggcgctctgctggagggcaagggagaactttcttttaccgctgaggagcatgaagccttgaaagaatttatccggctgtatatgcgggccgataatatggaacgggaacacatctacttccggggccatgcagacggatttgcctatctgaagaaaatcggcgctttcaaaactgaatagttttttgggcggcatggaaaaatccatgccgcttttacatatccaaattcattcgcacccccaaaaaggtcttgaacaaaacaagtttttacggattaggagtaaaaactattgaaattcttggagtttttggatatggcttaaagctgccgcccaaaactgcacattccccattcatatctgcatataaatcgcaaaagtatatgcagaaagtcgattggagcaatccagtcggctttttccatatctgaaaagagtacagccccttttacatagtcagctaccccacatggggcggctaatctatggctatgtgaagggggctgtatttttttatgcctttttacgattcagaagccatcgaacgggcaaggcaggtggacctgctcacctacctgcaaacctgcgaaccccaggagctggtccatgtgtccggcaacgtctactgtaccaagacccatgacagcctgcggatttccaacggcaaatggtgctggttttcccgcgggattggcggttacagtgcgctggactatctcatcaaggtcaacggctattcctttttggaggccatggaaactatctccggaagggctgccatcccgccgccttcctttgtgccagcgccgaaggaggaaaagcccaagcacctgcttctgccccaggccgccccggataatcgggcgatgatggcctatctcaaaggccggggcattgaccaggagattttggactactgcgttcagaccgggcggatttatgagagccggaacaagggccacagcaacgtggtttttgtgggcttcgacaaggatggcaaggcgcggttcggctgcctgcggggaatcagtgaagcccggttccacggggatttaagcggcagtgataagcacttttccttcgccctgcccgcttgcgtggaaaatccggcagtccatctgtgcgagtgcgccattgatgtgatgtcctatgccactctctgcaagctggacgggattgactggcggcggcacaatctgctgtccctggccggggtgtaccagccgaagaaaaagatggaggaaagcaagctgccggtggccctcacccgatttttggatgaccacccccatgtgaaaaccgtctatctccatttggacaatgacacggctggccggctggcggccaaggcaatcatggctgtcatgccggagggctaccgtgtggagaacaaaccgccgccccgtggaaaggatgtgaatgattttctgtgccaccggctggggattcccattcggggcagccacagcaaagagccggagcggtgagttgccagttttgcagcttcgacagattctccctcttgcaaattgttatcatatatgttaacattaaagcagtgaggtgagagtatggatgaactgcgcaaacggcagaaaatcatatcccagcttgtggaggcccgtctggagcagggcatttcccaggcagaactggcaaggcggctgggaatccagcgttccggcattaaccgcctggaaagtgggacacagaaccccacgcttgatatgatcttaaaaatcgcctcggcgctgggaaaggatgtttcactggaactgaacgacaaggaggagcctatgagtaatgtttacagtctccgcatttatgatacggagctaatgcgcttttccatggaaaagcagggcttgtccggccttgtggctgaaatcttatacaccaacgaggagcaggcccatttgctgcctttggatatggagcgcaccggcgagggcgtcattcattggctggagcggcgggttatccccaaaaaccgcgcctttgtggacgagattttgaaaacccttggcctcagccacaacgacaccaagggaatcatcgacgtgtgcaaggggctgtcgctcaacgacagctattgggtggtgccggaaggatttgaggggggattctcccaatacaatctttacgaaaatcgcttttccgagatactggcgctggtggcctataccggcgcaggcgggagcaggcaggcgtttaccacatccccggagctgaccacaggcggtatgctgcccaaggcgtggcgatatgtggagcacgatgggatttatctctacaagggcggcacgaccggcgcgtccaatgcgggccgggagccgtactgcgagtattatgcttcgcagattgcggaaaccatgcgtctgaacgccgtgcattatgacctggagaattggaaaggcattaccgcctctaagtgcgccctgtttaccaacatcgacacagcctatatccccatcgggcgcattgtccgaaccgggggcattgccgcctgccttgcctactacgacaagctggggccggagttttccgagcaaatccgcagtatgctggtgtttgacgctctgatttacaatgaggaccgccactttggaaactttggcgtcctgcgggataaccacagcggcaacattattgcgcccgcccccatttttgacaatgggctgtccctgttctgctatgccggtaaggaagattatgcgaatctggacgagtatgcaaaaacccgttctaacccctacaacatctcctatgaggaagtgtgtgcagaggtcatggggccaaagcagaaagagcagcttcgccgcatgatcgggttccggttcaagcgccacgaaagcctgggcctgccggaagaacatttgcaggccattgagaagcatttggagagccgggtgcgtaagctgctggcaatccccacccgtcatctgaaacaggagaaggcgcggtaaaaacgaatctcttttttggagagcgttctgaaaatggacgctcttttttgctgcccatttttagagaggagcgtgagtgatgaaccattatgatgttaccatccgggaaacgctggaggtgaaaatgaaggtggcggcaaacagccgggaggaggccgagcagtttgccagggaccaatggaaacgcggcgaagtcgttctggacgccagccattttaccggcgtggagttccatgccaagcggtatttccgtgaccggggcgagcgatgagttcttttttcgcctgtcccggattccccgcaggggaatggaatgtagctgtaccagcaagcatcgcctttgtgataccacaaaggccgcttgttagggggaacgccccctaataccccttttgaaaggatggaggttttcatggaaggattgtttttcgccattggatttctgctgggcggtgtggtcggcgtgctgattatgtgcctgcttcaaatcaaccgcataggcagaaaggaggattcggaagaatgagaaaacgcaacgtacacgtacagttttggctggacaaaaaagaggcggaagccttcaacaaaaaagtaaagcgcagcggcctttcccgtgaggcgtacctgcgccatctggtgaacggcctggttccccaggacgcgccgccgcccgcctactacgactttatgcgggagcttcaccggattggcggcaacctcaaccagatcgcccagaaagcccatgtgctgggcgtcattgatgagcgccgctatgatgaggaaatgcgaaaattcgaccagctcgtccgggacatcaccaaagcggtgatccttccccgcgctatggacacgaaggggtccccgcgaagcctgcttcgtggggagaaggagcacccgcgaagcggtgagccttttgacgcttgcggcaaaagcggcaagcggagcgcggtgtgacgtggctaccacgtctatctggcgggtgaacggctggctgggcaaggttctcatctatatcgagaatccagataagaccgaaaatcctgatttctttgaaaagcaggatatggatggcaaggaggcccagggcctatccgatgtgatcgagtatgccgtccagcagcaaaaaacaggcaagacggtggaaagcgaaggcgaaacggtcatgcggcagtttgtttccggggtgaattgcagcccctctacggcccgcgatgagatgatagcggtaaaaaagcgtttcggaaaggagggcgggactgtggcctaccacggctatcagagctttgcccccggcgaggccacgccggagctggcccatgagatcggccttgccctggcaaaaaagctgtggggtgaaaaataccaggtgctggtggctacccatctggacagggaaaatcatctgcacaatcattttgtagtgaacacggtttccttcgtggacggcatcaagtaccatcgtaccgagcaggattatttcgatatgcagcgggaatccgaccggctgtgccgcgagtatgggctttctgtcattgagaacccccagcggggaaaatccaagcactacggggaatggcgggccgagcaggaaggccgccccacctatctctccctcatcaaagccgatgtggatactgccatccgccagtctatgacggaacggcagtttttttatcatctgcggcagatgggctatgacgtcaaggtgggcaaggatattacggtccgcccgccgaattacccccgtggacgcaagctcatgcgtaactttggcgaggactactcgatggagaacatccgcaggcggattttagcccagcgccgcccccagcgggaacacaggccggagccgtttcggtgcaggctacacggggatttgaaacaggccaaaaaggtgacggggttccgcgccctctacttccactactgctatctgctgggggtattcccccaaaagcagaaccgcccgcccaggcgggtgcctcatgcactgcgggaggatttgatccgggcgcaggagcttaccgatgaagcctgccttctttcccgccaccgcattgacaccctggagcagcttaacgcctatcggtccgatgtgaaatctcagtttgccggcctgacggaacagcggaaaagcctgtaccggaaacttcgcaccaaggcagtgctggccgaccctgccaggcaggagtatatccgggctgagatctccaaactatctgcgcagatcaaggagctgcgccgggaggtgaagctgtgcggggatattgccctgcgctccacttccatcaaggataagatacaggccgcccgtgaggaagtctccggcagggatgagaaagcccgccaggagccggagcagggccgggcggctcccccaggaaggagatgatttttgatgtataactcaggcgacgcggcggagcaagtggtacggatgagcctggagggcgctgaatttgccctcaaaatcaccggttctgctgctaaaaatctggccgccgccctttacacggttctgaaagaccagaaaaagaccaagggcaaagcccgcattgaagccatgctgcgggagaagcgccccttaaaggtttacaccatcaagaaggaggattgcccggagtttgccaagcaagccaaggggtacgggattctttatgcgcccatcccggtgaagaaaggcgacgacaccatcgacattctggtgttcgaggatgacgctgccagagccaaccggatcgtggagaagttcaagctcaccgttgtggatacggcttcgatcaaggaggatattgagaaatcccgcgaacagcgcggcagcgaacccgccgcgccggagcaggccatgccggaaaagagtgtggacgaccagcttttggatgagctgatggaaaagcccacccagaaagaaaaagcccagccggaaaatccggcagcggagaagaacgccccttttgccccagcggcggaaaaatcccctccgtccgagcctatctccgagagcagcagcaagtccgcaaggggtacttctgatggagccgagaagccttccgtccggcaggagctgcgggacatccaggcccagcggaagaaggaggcggaggctgccagggccgaggagccggctgcaccccagaagaaggcggctcagaaaacaacccggcaccagccgcccaaacccaaaaagaagcccaaatcgaaagagaggtaatctgtgatgaataattttgacgatctgtttgaacagcagccccaggcggaggccgcgccgcaaaagcaggaaagccagaaagagcgccccaagcgccagtggtggcagatccgggaggaaaaacagcgaaaagaagcctatgccaccttggaccggatttttggagagttctccgagggtacgggcagtatggaggcatatctggatgtgcagagccgttttcccttccactctgctcgcaatgcacttctgattggggataaatgccccgacgcggtgcgtgtaggcggctacaaggagtggcacgcccagggggtcgagattttggaggatgagaagcgtttgcccatcatcattctggagccgggcaaggcataccggcgtgaggatggcagcgtgggccagaacttttacgccaaggaagtctatgatatttcccagactacggcgcgggatcaggttcagccccaggtgcgctacgatgaccgtctgctcttaaagggcctgattgccagttccccggtgcccatccgggccgtggaggaactgccacagggccgtggggccatgttttctgcagagcagaacgccatcctggtgaaaaagggcatggacgcgccggacatcttccgctgtgtttctctggaggttgccaacgtgcagcttgcccaaagcatggacggctattccagagagacagatggctacaaagcctatgctgtcagctatatgctctgcaagcggtatggcgtggacgccaaagagtatgagatttccaaactggacggcgtgtttcaggggcaggtccccagggaggatattcctgctgccctcaccgatatgcgggatacgttcaaatccctcaatggccgtatggccagggctatgggcctcacccgcgacagcaagcagaaggaacaggaacggtaaaggaggagtagacccatggaaaaacaggaaaaagtcgtcctcaccctggacagctatgagcatgggatcatgattcgcgccctcaacgaactgcgcaacgatatgctggaggaacagcgtgaccccggcccggtggaggacgttctgctgaaaaccattgacgccccagcccaaaaagacaagaaagcgaagcgccgggatgaagccagataataaggcgggcggcccctggctctatgccctggggctggtcccggtgatctggttcgccctgctgattgcgcctgccatttccgggggactttcggagatcgtcagcgccctgcctgcggcaatgaacaatccattcaaaatcgtgtggtgtgaggacagtgtaaaaactgtcctcatttttattgccgcctatgggctgggcattggcatttatctttcttcccggcgcaattacagacgaggtgaagaacacggttccgccaaatggggcgatccgcgggccgtgaataagaaataccgggacaaggatccgttcaaaaaccgcatttttacccagcacgtccgcatggggctggatggccggaagcaccgccgcaacctcaacactttggtggtgggcggcagtggtgcgggaaaaagtcggttctacgccaaagtgaacatctgccaatgcaatacgtccctttttattttggactgtaagggggaactgcttcgtgactgcggcggcctgttggaacagatgggctatgagatcaaggtggtggaccttctgaacatggagaaaagccattgctacaatccctttgcctatctgaaatccgacaacgatgtgcagaagatggtgacgaaccttttcaaagccaccactccgaaagggagccagtccaacgaccctttctgggatactgcggccagtatgctcctcatggcgctggtgttttatctgtggtacgaagcgccggaggatgagaagaatttccccatgattatggagatgctccgagccggggaggtgcgggaggatgatgattcctaccaatcgccgcttgacgaactgtttgaccggctggaaatgcgctccccggatcacatcgctgtgaagtattacaaggattaccgttccggctctgccaaaacgctgaaatccatccaaatcaccttggcgtcccgcctggaaaaattcaatctttcttcggtggcggctcttaccgccacggatgaactggacctttccagcctgggcgagaaaaaagtggcactctttgccctcatcccggacaacgacgccagcttcaatttcttggtaagtttgctgtatgccagcactttccaggaacttttttattctgccgaccgggtacacggcggtagcctgcccgtaccggtgcattttctcatggatgagttcgccaacgtgagcttgccggatgatttcgacaagctgctggccaccatgcgctcccggaatatcagcgtttccatcatcattcagaacattgcccagctcaaggcgctgtttgaaaagcaatgggaatccatcatcggcaactgtgatgaatttttgtacctgggcggcaatgaaacgtccactcacaagctgatctctgagaactacctggggaaaagcaccctctggctggacacctacggcaagagcaccgggcattccggcagctactccaccaacaaccagatcacgggccgggagctgatgacgcccgatgaggtccgtatgctggacaataacctggccctgctctttatccgtggcgaagcgccgctgatggatgaaaagtatgaccttttgaaacatcccaacatcaagtacaccaccgatggcggcgcgcctgtctattcccacggcggcactgaaaacgccgtggcggatatgaccattggccgcctcacccccggcgaccttgccaatatccaggagccggaaaccctttacgaacttctgtccgatgaggacatggagaatatctttcaatttaaggaggacaccaaaaatgaaactgtttcataaggaaagcaagcagaagaaagaaacccgcagcctgcccatgggaaaaaagagccggagcgcctttgctgtttatgcagccctggtgctcatgctgtgctgctgcaccactacggcctttgccgccagcgacccgttgactgttatcaacaacctcagtgatttcatcttcggcctgatccgcgccgtgggtatgatcctgctgggcttcggcgtcgtgcagatcggcctttctctgaaaagccatgaccccagccagagggctaacggctttctcaccttggccggcggtgttgtgattacgtttgcgaaggagattttgaccctgattaccggctgattctaataacggcagtgtgggggcaggcccatggcggcctgccccttaccgttgccggaaaggaggttgttgaatgtccgataactgggttgttcaaaatttgcaaaatgccctcgacacctggaacaagtacctgtccgagatctggcagctcatcacccaaagcccggaacagtttaagggtggctccatctggggcgtcattgtcaacatccacgacgcggtgcgggccattggccttgcgcttttggtgctgttctttgtagtgggcgtcatgcgtacctgcggcagctttgccgaggtaaagaaaccggagcacgccttaaagctgtttatccggttcgccattgccaaaggtgtcgtgacctatgggctggagctgatgatggccctctttaatatcgtccagggcctcgtttcaacaataatgaacgcggcgggctttggaaccgcgcagcagacggttctcccccaggagattgtcacggcggtggaaagctgcggctttttcgagagtatccccctctgggcggtgacgctcattggcgggctgtttatcacgatattgtctttcattatgataatgaccgtctacgggcggttttttaagctctatttatacacggccatcgcgccggtgcccctgtccaccttcgccggggaaccgacccaaaacgtgggcaagagttttatcaagagctatgccgccgtgtgtctggaaggggccatcattgtgctggcctgtatcatcttttccctgttcgcggcggccccgcctgctattgaccccaatgcggcggcagtcacccaggtgtggagctatatcggggagctggtctttaatatgcttgtcctcgtgggcgcggtgaaaatggccgaccgcgtggtgcgcgagatgatgggcctgtaaaaaaggaggaaaataaatgcgttatcaaacctatgtgctgcacttgattgatggaaccgccatcccaatggtggaggattacgacctgcccgctgaaaagggaattgtgggcacttctccaaagcagccccagacgagatttttaccgtgggcgaccggctgctgggctttgcctatatacccaagagcagcattgtttacctggaaaccggcgatgtgattgtgaggtgatattttggaagtcaagatcaaccgggaaatccgcaactacaccgaatccatgtttttcgggctgagtatgcggcagttcatcttttctgtcctcgcctgcagcgtggccgtgggcctttactttatcctgcgcccctactttggggtggaaaccctgtcctggatgtgcattttgggggcggccccctttgccatgctggggttcatcacctatcacggtatgacggcggaacaatttatctgggcgtggctgcgctcggaaatgctggagccgaaggagtttaagttcgaggacagcaactactactatgcggccctgaaagataccatcgaggagctgcaaaccgggcggcccggcaagaagcgccggaaggagccgaaacactttagcaaacggaaggaggccaagcatgattaagaccatcaaaaccatgtccaagcaggaaaaggagcgttacaccgtcccccggaaggtgcaggatgtgatccccgtccgccgtatctggccggacggcatcttccttgtggggaacaagttctccaaaacctataaattcagcgacatcaactatctggtggccagccgcgaggacaaggaatccatgttcctcacctattcggagctgctcaattccctggattccggtgcggtgacgaaaatcaccatcaataaccgccgtatgaatcaggccaactttgaaacgtccatcctcatgcccatgcagggggatttccgggatgagtaccggggggaatataaccaaatgctgctggataaagccaccggagccaacggcattatgcaggaaaagtatatcaccatctccgtggtgaagaaggatattgaggaggcccgcgcctatttttctcgtgtgggagccgacctgatttcccactttgcggcccttggctccaagtgcgtggagctggacgccaccgagcgcctgcgtatcctgcacgacttctaccgccaaggcgaggaatccgagtttgttttcaatgcccgtgagatgatgaagcggggccacagcttcaaggactatatctgcccggacgggatcgaaaaaaagagcgactatctgaagctgggcggcaagttctgccgggtgctgttcctcaaagactacgcctcttatattaaggataacatggtgacggagcttaccgatttcaaccgaaatctgatgttctccatcgacattgtgccggttcccacggatgaggccgtgcgggaggtggaaaaccgcctgctgggtgtggaaaccaacatcaccaactggcagcgccgccagaacgccaacaacaacttctctgctgtggtcccctacgatatggaattgcagcgcaaggaaagcaaggagtttttggatgacctcaccacccgcgaccagaggatgatgttcgcggtgatgaccctggccatcaccgccgacaccaaggagcagcttgacagcgataccgaagcggtgctttccgtggcgcgaaagcacatgtgccagcttgcggtgctcaagttccagcagcttgatggcctgaacaccgccctgcccatcggggtgcggaaaatcaacgccttccgtaccctcaccacggaatccctggccgtattcatccccttcaaggtccaggagatccaggataagggcggcatttactttggagagaacgccatttcccacaacctcatcatgtgcaacaaggcgaaccttttgaaccagtcggccttcctgctgggcgtccccggcgcgggcaagtccttcagcgccaaggagctgatcgcgtttcttatgctccacccagattacgcaaatgacgacatcctgatctgtgacccggagggagaatttggcgcactcgtcaaagccctgggccgggagaaagcgacggtggcccatctggtggcaggcggcaaggaccgcctcaacgccatgtatatggtggagggctacggtgagcaaaaccccatcgtggaaaagagccagtttgtcatgtccctcatcgagcagatcgacaagcgcggcgtggggccgcagcataaatccatcatcgaccgctgcaccgccctggtgtacccggaggcggagaatgccgggagggtggctaccctctgcgacctgcgtcaaaaactgctggagcagccggaggataaggccagggagatcgccctttccctggagctttacaccaccggttccctggacatctttggccgggaaagcacggtggatttgaacaagccctatgtggtgttcgacatccacggcctgggcgagcagctaaagcctgccggttccctggtcatcaccgatacgatcctcaaccgcgtcaccctcaactggaaacggggcaagcgcacccatgtgttcatcgacgagttccatgtgatgtttgagaatgagcaaagcggcattttctttaattccgcatggaggcagtttagaaagcgtggggcctacccgactgctatcacccagaacgtggagtaccttttggattccgtccaggccagcaccatgctctctaactcggagtttatcgtcatgctgaaccaggcggcgtccgaccgggcaaagctggcgaagctcctcaatatctccaacgagcagatgagctatgtcaccaatgcggacgctggctgcggcctcatccggtatggcagcgccctggtgccgttcatcaaccgattcccccgtgacaccaagctctatgccctgatgacgaccaagcccggtgaaggcgtattcggcggcgaggaggtgccggtatgagcaatcttcgctttgcgtccccggaacaccgggatttctttttggatatgatgagcgaggctcggaggaacgactgttaccaccgggcctttttctatgtgatggggattgccccggaaacgcggtcaaacatccgccagatgtttgacttcaagcaggactgtatcgagccggatggtatgcacggcggctggcagaccagcggcaccgtccgggtgtgccgccttgcttttaatctctggaacggctataccgacccggagcacagcaacgcctattccccggaggatttgttctgctgcgagttcgccccctactttatggaaggcgtgaaaatccgttacccgaaatactgccgggagctgccccctgtaagaaagcaggcggaaccggcgcgatgatacgtttgagaatggaggaatgaacaatggctgaaccggctcttacgttgcgggaccacccgcagatcatagacctgatttccgttctggaacagagcgggcttcaaaagcagaaggaagaagtacaggccctggtgggctatatcgacggtatggaagaaaagctgtcccagatgatggacgaaatgaaggaaatgcgcctggaggtgggcaagctccacgacaagggaatccgcgcacggtgctcccagcttgcggacactgtggagggtaaagtccgccagaccaaagtgatggtttccacggcaaaggaaaacctcatttcatctgcaaagcagatggtgcagaccttccgggaaaaagggcgctctgccctgtgccatgcggcccaggccctgcacatcccctcagttctttcccggatgggacggggctttgcccattcggaaaaaagcatggggcaactcgctgtgagactggactccatgcgggaagaattgcaccaggcgggtggccacatcaaaaacgccgggcttgcccttacgggaaaggaaccccaggaaagcaaggaattatctgcggataagggtgtgcttgccaagctgcggagctttgtgctgtcttgcggcaaggtgttttcggaaatggaacgcgacatggcgctcacggtggagcgaatcaatggcgggcgctcatcggtgaaaaccgaactgcaggggttgagatcggcccaggccgggcagcgccgccaagcggccagcaaggaacaggcacgataagtacaggagggtgaaatatgagtgacaaagtgaaaagcagactgatgatcgctggggcggccttttgtgccgccctgttccttttctccggggctatgttggcccgcgaatatctggaccaaaagcaaagcgccgaagcctttgacgaggtggccgggctggtcaaggaagatgtggagttgcccgcgctggagctggccgatgacccggcccaggagccggaagaactcacggcttttgaaaagtatgcggatgtgtacgccaagaacagcgatttggtgggctggatttctattcccggcacccggattgattatcccgtcatgcagaccaaggataaccccaacttctatctgaagcacgcttttgataagtcgtacagcagctatggggtgccctatatgcaggaaaactgcgacgtcggcatttccgacaatctgatgctgtacggccatcacatgaacaacggcagtatgttctccgatctgtgcaagtacgagagtgaggatttctaccaggaccacaagaccattcattttgatacgctggacagctttggcgagtatgaggtaatcgccgcatttaagacggtggcctactcagagcaaggcttcaagtattaccacttcgtccgggccgaacaggaagaagattttgacgagtttattgccaagtgcaaggaactggcgctctatgacacgggcgtgactgcggaatacggcgaccagctcattaccctttccacctgcgagtattcccgaaccaacgggcggatggtggttgtcgccaagctgctggaggaataagggcggccccgcccggggaaggaggtgaagcccatgggcaagggtataaaaacaagagtttctgcgaaaaaaggcattaaagcgattgataaagcggcggttgcttctgaacggatgaaggaggcatatatccgcaccaaggataaggccgaccacagcctgtatgcggaggaaagctctcctggtgaatatgcgtccgaccgcctttccgctggggtggataacgtcacccatgaagcggttcaccagtttgataaacagggccgcagaggggttcagacgactaaggagaatatctcccagctcaaggagaaaatccaaaagcggaaagccgcagccgaacagctgaaaaaacaagcggagaaacaggcggctcagcaggctgggcagcccgccacacgctggagtggccgtcaggcagccgatacggtttccgagccggccaaggcggtccgtcaggagcgcggggccatcaagaccctggaccgcggcaagaaaggcattaagacagtggacaggggccgaaaaaacatcaagcaggcttcttccacggccaagggaaccataaaaaccaccagcaaatccattaagacggcggaaaagactgccaaggccagtatcaagaccagccaacaggcggctaaagctgcccagcggactgcccaggccacggcgcgggcggccagggctgcagctcatgccgcccgcatagcggctcgaactgcggtagttgcggcaaaggcagcggtcaaggctacggttgcggcggtgaaagccatcattgcagccaccaaggcgctgattgccgccatcgctgccgggggctggatcgccgtgctggtaattattgtaatctgcctcatcggtatgattatcggctcctgctttgggattttcttttccggcgaggattccggcaccgggcagaccatgcagactgctgtacaggagatcaatacagattaccaggagaacctggatgagatcaagacgtcccacagctatgatgtgttggagatgtccggttcccgcgctgtgtggaaagaggtattggcggtttacgccgtcaaaaccaccaccgattcggacaacgcccaggaagtggccaccatggatgatgagaagctagagctgttaaaggacatcttctggcagatgaatgagatctcgtccagcacgtccacccagacggaaacagtgattgaaacatccgatgacggcaacggcaatatcgtggaaacggaaaccacggtcacgcaaacctatctgtatatcactgtcagccacaagactgcggaggaaatggccaaccagttcggctttaacgaggaccagcgggaacagatggcggaacttttagccgatgagaacaattccctttggtcccaggtgctttacggcattaccggaggggatggcgaaatcgtcacggtggcgctctcccaggtgggcaatgttggcggcgaaccgtactggagctggtacggctttggcagtcgtgtggaatggtgcgcctgctttgtaagctggtgcgccaatgagtgcggttatatcgaagccggcgtgatcccgaagtttgcggcctgcgcgtcccagggtgttccctggttccaggagcgtgggctgtggcaggataacagctatgagccgcgccccggcgacatcatcttttttgactgggatgatggaggccaagacggttcttccgaccatgtggggattgtggagaaggtggagaatggccgcgtctacaccgtggagggcaactctggcgactccgtgcgacagaacagctatcccgtgggatactatgagatttacgggtatggcacacctgcctgttaacagctccaaaaaagaagaagcccagccgcacaggcggctgggtacataatgataataacaaaagcatcgtccccttgacagcaagacaaaaatatgctattctgattttggtttgataattagattatcttaaataaagcgattatcagagaagggagaaaatattttgagttactgttccgacttgacaagagagcgaattatggaatgtgcgaaagtggaattcctaaaaaaaggctttcaggcaacgcagcttaaagatattgttaccgctgcaaaggttacaacaggtgcaatatatcgacattttaaggataaagaagcgttgttttttgccttaatcgaagatgtttaccattatacattagattttctggataatgcagaaccttacgataaagttggaattagagaagctattgaaagggattctgttgaagcgtcatatgttcaggcaatgacatatgtcaactatatgtacgagcatttggaggaatttcaactcttgctgaaatgcagcaaaggttctcgcgtcgaaaactttatagaagaaattacaattcaatatacgaaacagaatgccctatttgtaaaggcggcatatgaagcgggatatgcgaaatgtctgccaaacgatatagaaatacacattttgacgcatggatatattactgcactatgtgagtgtgttttgcacgatgttccttataaaaaggcggaggattatgtaaaaaatatcataaaattccagcactatggctggtatggtgtattagggcttccactaaaataagtggcttttgccatttattttttgccaaataattagttttcgctaacctatttaaggaggatttttcatgaagaaaaaaacgaaacctggagcaattcagcaattgttgagttatgcaggaaataataaaaagcaactatatctttcaacctttcttgcaacgctgggcgaactattcgggatggccccctttattacagtgtcattattagtcgcggaactatttaacaaaacagctactattcaaaatgtatgtatcttgtttgcagtcgctttgggcgggcaaatattaaaactgtggcttacatatcaatcctcttttatgtcgcataaggctacatataaaatattgaaaaatatccgtagcaaaatcgcagataaaatgcttcgggttccaatgggcgtcatgttggatacgccgaccggaaatttcaaaaatttgatggcagatacagtttcaaaattagaggattcgatggctcattttatgcctgaaataacctctaatgtagtggctcccctatgctgtatactactggtatttattcttgactggcgcatgggattagctgcattgattacaattcccctcggacttttgggttacattggaatgatgaacgattatgtgaataaaagtaccacttatatgaaatcacaaaatgcgatgaacagtacgctggttgagtatgtaaatggtatagaggttattaaggcatttaatcaaggaagtgcttcttatagtaaatttacaggtgcaattaacttcttccatgacagtactctggcatggtggaagcagagttggctttggtcagcagtcattcaggctgtaatgccgacaacattgttgggaacgcttccgattggcgcatggctttatatgactggaacattaccattatcagattttatcacttgcattatccttcctattggatttattgccccgcttatgcgagtaggaaaatattctgaacaatttaatatggtgaaagcctgcctcgatcaaatacgggattttattgaaaaaccggaactgaaacgtccagaaaaaaatgttgcactggatgaaacagcctatcgctttgaaaatgtttctttcgcttataacgagacggaagttctgaagaatgtatcctttgaaatcaaaccaggtactgtttcagcaattgtcggcccttccggttccggaaaatcaacgattgcaaaactcatggctggtttttgggacgccacaaaaggaaaagttatttttggcggaaagaatattaaagagattcctttcgcacagttgatgggtgaagtcagttatgttgcacaggacaattttctgttcgatgaaagtatccgtgaaaacatccggctcggaaaaccggatgcgacagacgatgaggtggtagctgctgcaaaagctgcctgctgtcatgagtttattgtaaagttggaaaacggatatgatacaaatgccggagacgcaggaggaaaactttctggcggagaacgtcagcgaattactatcgcaagggcaattctaaaaaatgcaagagtaattattcttgatgaggccacggcctatgctgatccagaaaatgagtatctcattcaaaacgctatcagtaaacttgtaaaaggaaaaaccctcatcgtagtagctcatcgtcttgcgaccatccagaaggctgatcaaatccttgtggtggaaaatggaaagattgttggctgcggcaggcaggaagagcttttatcagaatgcccactttatcaaagattatggagtgattatgtgagttcagctgatcaagtggaaggagggacattttaatatgttttcaattataaaaaggattttacggttatctgggaaatatcgtccccgtgtaattgccggactgatcttcaatgctctgaaatcctgctgcgccgcctttgtattttttgctgtgctattggtaatgttgaatatcgaacacttaacagagactgtcattttacaggcatttggaattgttgcacttagtgttttgggccgctttttgtttcagtacctaagcgatgtgctaatgagtgcgtctggatatgagattttccgggaaaagcgtcttgagattggaaatcagctcaaaagggcaccaatgggctattttacagaaaataatctcggcaccgtacaaacagtattgacaacaacaatttccgatctggaagggaattgtatgcttgcactaacatttttggtaggaggttttgtacaggcgcttgccatgacgctaatgttgggtatattttgctggcagattgggtttttggctttaacaggaattttagcgggaattcttgtactgggccagataaaaaagcgggccggcgcgcatacggaagatatgcaaaatgctcaggaattgttggtgggaagtgcattagaatacataaaaggcatttctgttctgcgcatattcggaaaaggcaaagaaggaaaaggaaaagtggatcaagcctttgaaaataagtgtcgcagcgatatagcggttacaatttctactgccggaattatgaagctgtatgaagccgtatttaagattacaagttgcctgttatttttattgtcagctttgctctatttgtggggagttatcacattgccctattgccttttatttatcatctgtgcatttttaatgttcatggaattggaattgatgaatgacggggcctttttgagtaaaatgctcgctacgcagttggatcggctggatttcatctcagatataccggttttagatggagacggaaaggatattgtcctgaaatcatatgagattgaactgaaagatgttattttcgcttatgacagccgtccggttttagatggaatcaccttgaaaatcccacagaactctacttgtgctatcgttgggccgtcaggttcagggaaaacaactttgtgtaatatgattgcaagattttgggacgtaaattctggaagtgttaaaattggaggacacgatgtaaaagaatttacttgtgatagccttttatcatatgtaagtatggtattccaaaaggtgtatctgtttaatgatacgattgaaaataacatcaaattcggaaaacctaacgcgacccatgcggaggtggtagaggccgctaaaagggcccgctgccatgattttatagaggcgctcccacaaggctatgaaacaatgataggagaagcaggttccactttgtctgggggagaaaaacagagaatttcaatagcaagggcgatattgaaagacgcgcccatcgttattttggatgaagcgacatccagcgtagacccggaaaatgaaaaagctcttttggacgcaatttttgaattgacgaaaaataaaacactaatttctatcgctcacaggttgtctactgttcggacggcagatcaaattattgtcattgatcaaggccatattgttcaaaagggaacccataaggaattagcagaaaaagaagggatttatcgtacttttttgaagtgcagggagaaatccatcagttggaagctatgaggtgtgttgccatgaaaaaacaatttccaattatatcttttgaacatgcctcttttcagtatgaaggacagtctcaggaaagtctaaaggatgtaaagcttatcataaaatcgggagaatttcttgttattactgggcagagcggatgtggaaagaccacattaaccaggtgtatcaataatttgattccccgcttttttgaaggcagattatccggcgaagtcattgtattgggacgttccataaaagaatcggacgccggtgaggctggcaaagagattgcttcaatttttcaagatccccgcagtcaattttttactacaaacagttccagcgaagttgcatttgcctgcgaaaactatggaattccacataaagaaatcgttaaacgtgttaacagcgcctttcagtcactgaatatggagaacctaaaagacagagatatttttgccctgtccagtggagaaaggcaaaaagttgcttttctcgcagcgactactcttaatccacaaatttatgttctggatgagccttcggctaatttagacattcatacaatcttacaggtaagagagattctttctgctttgaaagccgctggacacacgattattgtttcagaacacagattgttttacttatacggactcgcagatcgctttttaattatggaggatggtcaaatctgcgaagaattaacaggtgaggaaatggcagaattatctgctgtccaaatgcacaacagaaggcttcgcccgttaaatttggatttaatacaaatagaaaggaaagaatctatttgccgctcggaagtatttctccaaattagaaatttgagcttttcgcataaagccatgccggaacttcttcacaacatttcattagaagcctacaaaggcgaaacgattgccttgattggagaaaatggttgcgggaaaacaacattggggaaaatcttgtctggcttgattcgctgccgccaaggtgcgttttacattgatggaaagaatgtgaagcaacaaaaattatccgactatgtgtactttgttatgcaggaggcagatcaccagctttatacagacagtgtgacggaggaattgaggttaggaaacaaaaggattccaagcatagatgaaaaagtgtctcaaattttgaaaatgctccatctggaaaacttcaaagactgccatccgtatgctttatcaggcggtcaaaaacagagactgacaataggagcggcaatgctttcggaaaaaccaatcatcgttttggatgaaccaacaagcgggttagactgggataatatgtgcgctgttgccaatgctgttaattatatgcgtgaggctggaaagctggtctttattattacgcatgatctggagtttatcagcctgaccgcctcgcgcgctttgcttttgaaggaagggattattaaagatgatttacaaatgacggaacaaaacaatttcaaaatcgtaaagaattttatggtggaggaaggtggtgaataaattgagaaagcatggagtatattacgattctcgcataaaacttctgttgattctattgacatcagctttggcgtttgctttgggtggaggcttaacaggcttgttactctttggcgtcgtttgcctgtttgctttgctaagtggactttggaaaacaagtatcaaagttgcaatagtttatatagttctgcttatgttggcgcaagtccttccaattcatttatcttccgtgataacattctttttactaagaattttgactattgcacttgctttgaatattctatttcagactacggaaatatcggaattgatagcagcgcttcaggcaagtcatatccctcaagcaattgtgataccagtggctatcatattgagatttcttccatctttgaaacaagatgtgctttatataaaacaaggggaggtatgaaaatgaacgtaaaaaaaacggaaagagacggcattgtccgcgcctatcccgaaaacggcaagccgctcgcgtggtctgcgtcgtccggtgtagagctcatcgaaagagacggcctgtattttaaagacttggagaagaccggcgagcttctcccgtatgaagattggcgtttgcccgttgaggagcgcgccgcagaccttgcttcccgcctaacaacagaggagattgcgggccttatgctctattcgccgcaccaagcggtgccgcccatggcgttcggcccgttcggcggtacatataacggccaaaagtacgcggaagcaaatgtccctgcgtatacgctcaccgaccagcagaaggaattcatgaacaaagagcacattcgccacgtcctcatgattacggtagaagacgcgaagactgccgcaaagtggaacaatgagctgcaaaagcttgccgaaagcatgccgcacggcatcccggtgaacatttcctccgacccgcgcaacggtgcgcgcggcagcggcagcgtagagtttaaaaccgccggcagtgacgtcagcaagtggccggagggtgtcggttttgccgcgtgctttgaccccgagattgtccgccggttcgcggaggatgcgtcgaaagaataccgtgcgctcggcatcaccacggcgctcggcccgcagattgacctttgcaccgagccgcgctggatgcgctttgtcgatacgctcggtgaaaatcttgagatgacaaagaaaatggtcaaggcgtactgcgacggtatgcagaccaccgagaattccgaaaacggctggggatatgacagcgtaaacaccatggtcaagcactggccgggcggcggcacgggtgaggccggccgcgatgcacactatgcctacggcaaatacgcggtttacccgggcaataattccgaagaacacaggaaaccgtttacggaagcggcgtttaaattagacggtcccaccgaaagtgcctctgccgtcatgccgtactacacggtttcttggggcctcgacaccaaaaacggcaaaaacgtcggcaactcgtacagcgagtatctcatcaaagatctcctgcgcgaaaaatacggctttaagggtgtcgtttgcacagactgggacatcacgcaggatcccgcacccattatggatacgtttgcaagccgctgctttaatatggaaaacatgaccgagggcgagcgctgcttcgtcgccatcatgaacggcgtagaccagttcggcggcaacgcggagattgcgcccatcatggaagcgtatcaaatcggctgcgaaaaggtcggcgaagaagccatgcgcgccagaatggagcgctccgccgcgcgtctgctcaaaaatattttccggtgcggcctgttcgagaacccgtatctcgatcccgaagagtccgccaagattgtcggcaacgcggaattctgcgcccacggctatgacgcacaacgcaaatctgtcgtcttattaaagaatcgcaatcactgtttgccgctccaaaagggtatcaaaatctacgtgccgcagcgcaagctccgcaccatgaagggcttcatgcgcaacgatattcccgcccacacggaagaccacgtgacggacgaggtgatttcgaaatacggcgtgcgcgtccatacgcccgaggaagcggatgtggcgcttgtctttgtggaaagccctgcgtgcaacgcgtattctacggaagacgtcgcaaacggcggcaacggctacctgcccatcacactccagtaccgcccctatacggcggtgaacgcgcgcgaagtgagtattgcgggcggcgatttccgcgaggatttcacgaaccgcagctaccgcggcaaaacgaacattgcctataatgaatgcgacctggataacattctaaactgtcgcgaggcgatgggagacaagcccgtcattgtctgcgcagcgatcaacaacccaatggtcatgcacgagtttgagcgtgaagcggacggcatcgtcgtcgagttcggtgtttcccgcgccgcggtgcttgacgtcgtcttcggtgattacgatcccaccggccgtctgcccgtgcagatgccgaaggacatggacaccgtggaaaagcattgcgaagacgttccgtttgaccttgaagtgcacgtggatgaattcggtcacgcctacgactacggctttggcatgaattatgaaggcgttatcgagaaataaggagtgacatctaatggatacagtagaaaaatgggggctttttgaagtttctctcaagggtccgtctgcgggcaacccgtttacggagcagtccgtttccgccacgtttcgcagcaaaaacgaaatcgtcacggtaggcggcttctatgacggcgacggcgtttataaagtgcgcttcatgccctcttttacgggcgattacgtctatgaaacggtcggcagcttcccggaagcggagtctgccggcgatttcaccgtaacggagccgaccggcaataaccacggcccggtgcgcattgcgaacacgtaccatttcgcctatgaagacaccacgccgtactattccgtcggcaccacgtgctacgcgtgggcgcaccagccggaagaagtgcacaagcaaacgctcgaggagctcgataagggctacttcaacaaaatgcgtttctgcgtctttccgaagcactacatccacaatttccgcgacccggagacctttccgtatgagggcaccccggtcgataattcaaacctcaccgaagaaaacttctcgtatttcgtcgattttccggcaacaactggaattttacgcgttttaaccccgagcattttcgccgcatggagcgctgcatcgtagaattgcaggagcgcggcatcgaggccgacatcatcgttatgcacccctacgaccgctggggtttctccgtcatgaaccgcgagcaggacgacctctactggaactacgtcatcgcgcgcttctccgcctaccgcaacgtgtggtggagccttgcaaacgaatacgacctcatgcgcgccaagaagcttgaggactgggagcactacgcagacctgctctgcaaaaaagatccgtacaaccacatgcgttccatccacaactgcataccgttctacgaccacacccgtccgtggattacgcattgcagcttgcagcgccaggatctctaccgtcacgtggaatacaccaccgattaccgcacgcgctaccaaaagcctatcgtgtgggatgagattgcctacgaaggcaatatcgatatgggctggggcaatatctccgggcaggagctcacccgccgcttctgggaagcttccatgcgcggcggctatgcaggccacggcgagaccttcatgaaccccgaagacatcctgtggtggagccacggcggcaagctgcacggcgaaagccccgcgcgcatccgcttcctgcatgaaattctcacgcagacgcccggtctcggcttaaagcaaggccccggcgcatttgatgagaccgtcgccgtgccggacgagatgatccccgtcaccggctacgagattcactactacggcttcggccgcccgagcttccgcgatttcgtaaagcccgcgggcgaaaactggcgcgtggaggtcatcgatacgtggaacatgaccatcaccgatgccggcgtgcacagcggcaagttccgcattgcgctgccgggccgcgagtacatggccgtgcgcctcacgcgcgtgtaaacattcataaagcgtataaatttaaataaaccgtaaaagagggcacccgcagcgctgcgcggtgtcctctttacttgacagaatctttcccgcgccgtacaataaacccaagataacaaagaaatattccgaaaggatgactatattttggcgaataaaagaaaacgccccgctgctatgcgcgaggaagaacggcaggcacagcgcgcagccgcccgtgcggagcgccgcacaaggcgagccgcagagcaggccacacagaatgtcccgcagaagacggaagccccgaaagcgccgcaaaaagcaggcgtgcctcataaaaagaagaagatcaacaagttccgcgtggcggtcgtctgcaccgccgctgtgctcgtggcgctcgttgccctcggcgtggccagcgctgccggtgtgcgcacgcccatcagcagtatcgccgcagacggcgagccggagttcttctccaccgtaaaaccgcaggccagcgccgcaccggcagaaaacactgcttccgccgcgcctacgccgtcttccgcttttgacggcgcacttttcatcggcgacagcatgacgacgcgcctgaaaagctacgtcacggacggcgcaggcagcaccaccgctttgagcgacgcggaattcatgacccgcagcgattattcgtggggcgaagcgcagaacgaactaaacggcggtgagggcggcctgtggctcgacgatgacaccgctctcaccgtcacggaagccatcgaccgtttctccgcgacgaagctttacattcaactcggcaaggaagacctcacgtataacgacgtttccgacgtcacgtccactgcacaggcggttatttccgcgctgcaaacgaagtacccgaaccttgaaattaccgtgcaggccgttacgcccatgctggagtggattgactatcaggggctcagcagcagcaccatcgcgcagtataacaaagcgatgcagacctattgcacgggcaaaaagaacctgaagttcttaaacatcgccgcattctgtacagagggctaccttcccgcggagtattgcgctgaccccgagggcttgtgcatccacttaaacgacgagggctgcgccatttgggcagattatctcctcggcaacaaaacgccggagccgtcgcccacccccacgccgacccccgatccgaacggcgacagcaccgataacaccgatacaacggacaccgccggcgacacctacacggacgattccggcgattatacggacaacacaggggattacaccgatgatacgggcgactatacggatgacaccggtgattacacagaagaataacctacaaaatatggcatgcaaaatgtttggtataccatattttgcttttctcaaaactttttgaaatttttttgaaaaaaggcttgcaatttagaaagagatgtggtattataataaagccgtcagatgaggcggcaaacagaatagttggtgttgattacaacgagggtccacctgttcccataccgaacacagaagttaagctcgtttgtgctgaaaatactcggctggcaacggcccgggacgataggttggcgccaacacttagaagaatcacagaaatgtggttcttttttatttttcaaaagctaaaagccccctctgtcagaggggttttttcatttacgcttgcttttagctgtccgcgcagaaagcttgagcaaaactttattccttcaacaggttttacttcacgacttaccatattcagcaaaacaacgggaaaaaacgccttttttccctaaaacatggcgtcaaaaaacattgacatatccgtgaaattgttgtaaacttttttggaattctgcttttttcgtctgcgtgctccggcggcaggcggacaaagaaaaaagatatacaaacggaggggcggagaccggcactttcctgtgtggccgcacgcgtacctcgaagaaaggtaagtgttcaaaaagtggaaaaaaccctgatttgtctggccatcgctctggtcgtcggtctgctgatgtcccgcttggcaaagctcgtacatctgcctgcggtcacggcgtacctcgtcggcggtctgctcatcggtccgttctgtctcggcgcgctgaaccttccgtacatcggcttcaattctctggagcaggtggagggcctcagcgtcatcacgcagacggcgctcggcttcatcgcgttcgccatcggcaacgagttccgcgtctcgcagctcaaaacgatgggtaagcaggccatcaccgtcggcattctgcaggcggtcatcacgactattgtggtcgatatcgccctcattgtcctgcatctcatcaatcccgccctcctttcgctgccctctgccatcaccctcggtgccatcgccgcggctacggccccggcggctacgctcatggtcgtgcgccagtataaggcagacggcccgctcacaaagctcctgctcatggtcgtcgccatcgatgacgccgtgggcctcgtgctgttctccgtgtccttcggcatcgccggcgcgctcgaaatgggcagcatcagcgttgtcagcgtcattttagagcccatcatcgagatcgtgatttccctcgtgctcggcgcactttccggccttgcgctcaactggttagagacctatttccattctcgcagtaagcgtttgtccctcacggtcgccttcgtgcttctcatggttggtatctcctccatggaatttgagctcggcggcgtgaagatcggtttctctctgctgctcgtctgcatgatgaccggtacggtcttctgcaatgtgtgcagcgcttccgaagagctgatgagccgtctggatcgctggacaggccccatcaacattttgttcttcgtgctttccggcgcggagctcgatttgaatattttaagcaacccgctcgtgctgctcatcggcatcatttacatcgtcttccgctctgtcggtaagatctccggctcttacatcagctgcgccatgacaaagtgcagtgaccacatcaaaaagcatctcggcatcacgcttctgccgcaggccggcgtggcgctcggcatggcgctcaccgctacgtcccttgcagacggcagcatcgtgcgcaacgtcgtgctgttctccgtgctggtgtatgagctcatcggcccgtctctcacaaagcgttccctgcttgccgcaggcgaaatcaagcccgagggcaagaccagcgcccgcgaggagaacaaacctgtaaagcccattaccctcaagtaatttcatagaatacaaaacgcaggaaggcaaagcgctttcctgcgttttttcatgcccgatttcatcttgaaaacagggaacaaatgtgctattatggtgaaaagaaattcttagggggcgtttgagtgcgcgttgtgattgcgatggattcgtttaaaggcagtttgtcttccatagaggcaggcaaggccgtggcagagggcgtacgccgcgcagacggcgcaatcgagtgcgcggtgtgccctgtggcggacggcggcgaaggcacgtctgcagcgctcacagagggcctgcacggcgaaacggtgcgcgtgcgggtcacgggtccgctcggcgagaaggtcacggcggaatacggcgtcaaaggcgatctcgccatattggaaatggcacaggcagcgggcctgccgctcgtaccccaagataagcggaaccccatgaaaaccaccacctacggcgtgggcgaaatgctgcgcgatgcaataaatcgcggctgcaagcggtttatcctcggcatcggcggcagcgcaacgaatgacggcggcgcaggcatgctgcaagccctcgggttcgatcttttggataaggacggcaaccccgtcccgttcggcgcagaggggctgcgcgtgctcgcaaaaatcgagaacaaaaatgccctgcccgcgctcaaaaactgcgtcatccgcgcggcgtgcgacgtcacaaacccgctgtgcggcgaaaacgggtgcagtgccgtctttggtccgcaaaagggtgctacacccgaaatgattcgcgaaatggacggctatatgcgagattacgccgcattgacgaaagaactgtatcccgaaagcaatcttgatacccccggcgcaggcgcggcgggcggcctcggcttcgcactcggcgtgttcctgcacgcagagctcatgcccggcattgaaatcgtcatggaggaaacgcacttagaggaaaaaatcaaaaatgccgatttcgtcgtgacgggtgagggcagattggacgcccaaaccgctatgggcaaagcgcccgtaggcgtggcgaagtttgctaagaagtatcacaagcccgtcatcgcgtttgcgggcggtattgaaaagggcgcggaagcgtgcaacaaagccggcatcacggcgtttttccccgctgtgcgcggcgtgacgacattagacgaagccatgcgccccgaaaccgcggcggaaaatctcgccgaaagcgcagagcaggtctttcggcttcttaccctgcgataaggaggtacggtatgcacgatatttggaacccgtggcacgggtgcgtgaagtgcagcgagggctgcgcacactgctatatgtattttctcgacagtcagcgcgggcataacggcgcggaaatttaccgcacaaaaacgggctttcactatcctttaagccgcgaccgcgcaggcaactacaaagtaaaaagcggcgagcagctgcgcgtgtgcatgacgtccgatttctttttggagcaggccgacccgtggcggcgtgaagcgtgggagatcatggatcagcggcgggatatttcgtttttcctgctcacaaagcgcccggagcgcgtagaaaaatgtttgccgtataactggggcgacggttgggagcacatctttttcaacgtcacgtgcgaaaatcagcgccgcgcggacgagcgcatccccatgctgcacagcctgccgtttaagcacaagggcatcatgacagcgcccttgctcggccccatagagattgaaaaataccttgcgatggggcagattgagcaggttatctgcggcggcgaaaactacgacggcgcgcgcccgtgcgattacgactgggtgcgctcgctgcacaggcagtgcgcaaaccaaaacgtcacgttctgctttatcgagacgggcacaaacttcatcaaggacggtcggcggtacttcctgccgaataagcgcgtgcaaagcgaaatggcgtataaatccggcatatcgtatcagggcaagccgatgaaattcaagctcgaagacgattacggcctgttcgacgccgggcgaaaatacgaaaaatactttggcccccagtgcgaaaaatgcggcagccgcatgatctgcaacggctgcgcaaggtgcggtaaatgcactgtgctggaagggaaatgaaaaaagaccgctgtatgtgcgtaatgcaaatcatacagcggtcttttaattttctaaaaagctatcgctttttcggggccccccttaatagggttccccgatttcaaatgtccaccggacatttgaaactcctctcctgatttttggtaggcaaaagagtttcgtcgtctgcggacgacgaccaaaggtttcacttttggaaacggacaagcttttgaaaaagtttgagcaaaacttttaacccacgttgccggtcactttgttctttccgtcttcttccgtcccgtaaaaattgaaacgccgaagatgacgaaaagcagcagcaccgcaaagcacatccagctcacaaacaccgccgtactcttgccgctgaacatatcgtagtagcctttcaggtaaatgatgaccacaatcagaggcagaatgtactgcatgtaaaggcggatccagtgcgggaacttaatgccctcgcctttgttcgcttccttgaggaaattctcaaagccccaaccgtttttgcgcacgcagaacagtacgaacacaaggctgcccagcggcagcagattggaagaaacaaggaagtcttccatatccataatgttgctgccctcacccagcggctgaatgccggaaagcacattaaagccgagaatcgccggcagggaaagcaccgtgatcagcacaaagttcacgcccacagcctttttgcggctccaaccgccgatatccatgaagaatgcgagaatctcctcgaacaccgcaatgatggtcgaaagcgccgcaaacgacatgaagatgaagaacagcgtgccccaaattctgccgcccgccatgttattgaagagcgtcggcagcgtgatgaacagcagcgacggacccgagcccggctccaccccgtaggcaaagcacaccgggataatgatgaaacccgccatcagcgcaacaaacgtgtccagcagcacgatgttcaccgcttcgcccgtaatgcgctttttgcggtccagatagctgccgaagatctccatggagccgatgccgatggaaagcgtgaagaacgcctgcgacatcgccgcaaacaccgcgttgccgaagcctttctttgccacttcaccgaagtccggcacaaggtagaacttgatgcctgccgcggcattcggcaaaaatgcggagttcacagccagcgcaatcatcaaaagcagcagggcaatcatcatgactttcgtcactttctcaatgcccttttccaggccaaagccgcatgcaccgaacgaaataacaatggcgacaatcgcccagaacgtcagcgtgcccggatttgtcagcatatcgccgaacacgccctctaccgccttgccgtccaagccgacaaacgtaccggttgcctccataaatgcgtatttcagcatccagccgcccaccatggtgtagaacatcatcagcaaaaagctgccgagaatgctgatccacttcatgcgatgccatttcgtgcccttcggttccagtgtatcgagcgccttgcccatgcccatgcggctgccgcggcccacggtgaattcgcacaccataatgggcagacccagcgccacaaggaacacaagatacatcaggatgaatgccgcgccgccgtatatgccggtaatgtacgggaatttccacacattgccgataccgatggcgcacccggccgaaactaaaataaatcccaaccgagaaccgaatttttctctttctttcatacgttttcctcccaaattttttcccctgtatattttaaagaacgcatatttgcgttctaatcgggcgaggttatgtgcggaaggcgtttctttgccgcacaacttcatagaacatcacggtcgccgcaatattcctcactgcatgtttttcagcatggcgaccgcatcccgcacgtattccgagagcgtcttgtcctgtacgcccactacgcttacggagcagcggttaacgggaatcaggattttcttagcaacgcattcggaaacggctgccgccattttcggcgtgatctcgccccaaagcgcgtttgctaagataatgccgatgggtcccacgatgacgtctgcccacgtgcagtttaccacaacggggttttcgcctgtggcggcagcgtccgcaccggcgcgcagcatggcgcttgtggcaaggctgttcgtgcccacggcaacgacttccacgtccggcatgttctttttaatttggtcagtcagtgctgcgcccattttgccgccctgaccgtcaatcacgagtattttcatcaaaatcaaccctccgtaggttcgtttgtgtcgccgtccaaaacggcggaaacgggaagttcgccgtacatcagcgatgtgcagttgatctgcatatcgcccacggtgacgggcttgccgtccgaatacacctcaaggttagaaagcgtcatgcccgcagcttcataaaatgcacggaacgtctttgcaatggcttccagagaagacgtggagctggcggagtctaaatattcctgcaaagcgccggaaaactgcaaacgcacctccagcatttcgccgctcttcatcgtggagacaacctcgccgtctttaacgtagtcgagcgcgtccagcgtcacatcctccggaaatgcgcccttttctgccattttctgcacgagcaccgcaccgtctgcgggcagactcttatagctgtactggtcaaggccgctgtcgctcggcacaaaaatcgaaagcgacatgttcacggcttcgcgcgtgtcttcggaagcggtcggctccggagtcagcgtcacgtggctcacttcgctttccgcggcggacgagaccggcgtgtcgctctctaaaatcacgtccggcgtgcgcacgtatttcgtgccgaaccaccccgcgcgtacggcgacaacgcacaataaacagattacaatgacgcctacggccgcaaacggcatggcgcggtctacgttgcgcttcagacgctttgcgcggctgttcgcggtaaaatgcggatctttcgattcattcaaaacagaataatacacgcggtgcagaagatcgtccggcgtttccagggtttctacccattcgcgcaggtcgtcctcgctcatgttcgcggcttttttgactttttccagctgattttgcacggcagaagcggattttccggtcacgcggccgataatgcgcgtgttgtcacctgcaccgtagtgcagcgccaccgccgtcaacagcgtgtaatgcaggcgtaaaatgtcgcagagttctttcggcgtttcaaacggcatgtcttttgagcgctgtgcaatctgctcgtccgtcagcttttttcgaattttctgtgcataatagtccatgcaggtcttgtgcgttgtgcgcagcacccaaaggcgctcctcgccttcgcttttaaaggtttgcgtgtctaaaaagtactgcataaatacatcggaaagcagtgtaagcgtctctttgccgctttttgtgtgcatataacagatgcggaacgcgtcgtcgccaaagcgcatcacggcgctttgcagggcggtttcacttcttgtctgtggttttgccatttgcatcgtttcctttctctgagatgagtttgcggcggcgacgttctgttttcaggtcggaaacatcgcggttgatgccgctgtgctgcagccacatggcgatctcgccgccgatgagcaaaataaacatgcaggcatacagccataccattaaaatgaccaaagcggcaaggctgccgtagatggtggcgtagtttgcgaagttctccacgaaaacggagaagataaacgagaataagacccacccggcagaagccagcgctgcgccgaaaaacgcgttgcgcagggatacctgcttgcgcggaatggcaatgaacatcaaccagaagaagaacagcagcaggacataggacatgatgggcttaaagcggttgatgagcgtcgggaacgccggcggcatcaccgtgatgagccattcatacagcatgtcgccgaagaccatcaggcccatgctgacaagcagcgtcatgacgaacacgaccgtgtataaaatggctaaaatacgcataaaaatatagttgtggtttttggaaacgtcaaaaacggagtaaagccccttgatcagcgccaccatagccgtggaagcggaccaaacgcaggtgatagccgtcatggaaatgagcgtctgcggcgcgtgcacctcttgaaataagtaactgacaacttcttccaccggcggcggaagcatttgaacgaatgccacgagaagcgaggtgtcttcaaaccgaatgacctgcaaaagggctaagaccagcatgaggaacggaatgaacgaaatgaggatccagaacgaaacctgcgccgcgtaggagtcgatggcgtcgttattcagtttttcataaaaccagccgaagtgctttttcagcagaattttcacggcgctttctcccttctcacgctttccttacgtcttatcgcgcaatttgagaacagtataacacagaaatatagaattttccagtgaaaaagcacttgacaaaagaaaaaatgtgtattataataaactacgctacattatagagcagatatggcggcatagctcagttggctagagcattcggttcatacccgaagtgtcgatggttcgaatccatttgccgctaccatctggcccggtggtcaagcggttaagacaccgccctttcacggcggtaacacgagttcgattctcgtccgggtcaccagaaaaaagagccttgtcaaaaagacaaggctcttttttcaacgaaataaatcccttcggaatttgtgaaattgcccttcgggcagtgaaatgttgctgcgcaacgtgaaatacctgtggtgtgtgaaccgcgctgcagcgcgtagggatttatttcatttcaattgatgcgtagcatcaaatttcacatttcgcagcgcgaaatatttcacttaaaaatgtcgaatcttgtcaaataaaacacgccgtctgcgaaccgaaagcggttcgcggacggcgctttaaaatttatttataaattacacaaataatcattcaaagtcgtgggtgtaaatttcgctgccgtcgccgttcaagtagacgaggcggacgtgcacaccggagagacctacttcgctttcgagcgtatcggcgatatcctcaaaggtagaagcattttcttcgcagccttcttttaaagcatcgagcacggactgctttatgtcttcgtcggagaggtcgtattcatccgtgaactgatattcatagacgagcgcattgccgtctgcgtagaccttgatcgtcatgctgtcatcggtctgattttcaatttcggcatcgatggacgcttttacgtccggatcggcgagataatcggcgagggaggcaaacatggcttccccggtggaggccgaagattcgggttcggaggacgcagtgctgtcttcggaggtggcttcggaggaagaggaggactcggcggaggtgctgcttgtgttccccccctacgatggttttggcggaggtgcagcctgcaagcgcagagagcgagagcagaccggcgagtgccaatgcgcagagttttctgagtttcatttggttttacccctttgtactctataaaaatagagaaaattttggcggattttgttgccgccatgcactcaatatagcacatgggtttacaaaaatcaagaagcatacggcgaattaaaatttggagaggaaaggaaaaaagcgggacaaggattccggacgacaagacggtaaaattcatatttcttggaacaggcatgaccgaaatcatgcctgttccgtttttatcggctcatcttttttgaccatcgaccgttttgtaagcttattatgccgttcgggcataaaggctgtgttaagcaaggggactttggggcgattgaaacagcaaaagactggcttttacaacgcggttgacaaaatggatcatttcctctttgctgtacttgtcatagccctccacaacgacatgcatcaaaccgtttgacaggtgggtatacatcatctcaagctctgtttcgtcggcattgggcagctctttccgccagtaagcaatgctttcctccttggccaaagcaatcatccgcatgaggaccgttgcgcctgtattcccaagaatcaaaacccggcaggcggcctgattctgatcgaccatatcgtaaatggcttcgatcagtgccgtcacatcaaacaaattgacatagcgaagggatttctcaaaggcatcgatgagttcattctcaatgctctccatcagggcaaagcaatcgctgtaatgggcatagaaggtggcgcggttaagctgcgccagcgcacaaacctccttcaccgtaattctgtttacgggtttttccttcagcagcttcagaaaagactgcttgagcaccatttgcgtatagcgtttccttgcgtccattttctccatatagagcccctcccaaaaaaagtttacaaagaaaagcaacacttcaacagacaatgttgcttttctttcagtcgtatggcaagtgctgattgtttctgtctttcctctcaagtatactgtacttgtgaaagataatcaacacttgtatgcttatttgagaggaggctttttgcatgtttgatcaatatcttgttacaggcgctaccggcttcctcggtagggctgttgcggaggagctggtacgccgcagagcgcaagtgcatgcgcttgtgctgcgtgatgacccctatatccatttgctccccaaagaagtccataccgtcatcggtgatgtgtgcgtggaaagctcgttgacagacttctttgcggatgccgacagccgtacctgtgtgattcactgcgccggtatcgtctctgtcgcgtccagacccggttcgaagctctatcaggtcaatgtaggcgggacatggagggttctccggcaatgtatggagcatgacgtgggcaaaatggtctatgtcagctccgttcatgccataccggaaaagtcaaaggattgcatcattacggaagattgcgaattctctccggggcttgtggacggagattacgccaaaagcaaggcaactgcaacagagctggttttcgatgcggcggagcgcgggctgaatgccagcattgtctttccatccggcatcatcgggccgggcgacatgcagggagggagcttcacctcaatggcgaaatcttttcttcgcggaaagctgccctttgccgttcgcggcggatatgacttcgtggatgtacgggatgtggcaaaaggcattctcgactgttccgagaacggagaacccggtaagggatacattttgtccggccactatgttaccattcgcaagatgcttcagcttgtgggaaagaccgcaaagcggaagtatcgccccatctgcctgccactggggcttgcaaagctggcggctccatactatgaacatcgaagcctgaagaagcgaaagccgctgtttttcacaccttattccgttgccgtacttgcctcaaacggacaattcagccatgccgcagcatcggaatgctttgcatatcatccgcgcccggtgaaggatactttgcgggacatgacagcctggcttttggagcagaggagaaagggcgaagtgtgacctcacctaaaagcacctcgggcaggctgcgcatgctattggcatgatctgcggttccggttgctatccgtacgtatcctgtgatataatttaagagagagaaagagaaaacgccgtccgacccgcgctttcaggaacagcaccgagattccggcagggcaagcacccggcggatacccctctgcatttggagcacccgcaaaaaggaagtgaacgctatgacctgcgacgagactttttaccaccgatatttgaacggcgacgatgcggggctggaggccctgatgaaaaaatacggcaatccgctaaccctgtatatcgacgggtatctgcacgatgtccacgaagcagaggatttgatgctggatgttttcgcctatctgttcacgaaaaagcctcgcatccgggacggtggcttcaaggcatatctgtataagacggcgcggaatatggcgctgcgccataagagcaagcggaagtgtctgttccgtttggacgagctgaccgatgaatcggacgggcagctgcttgtggaggaggttatccgaacggaagaacgaaaccgcattctgcatgggtgaaatgaacccggattaccgggaggttctgtatctgacctattttgagggtatgagttacgcacaggcggcggaggttacgggaaaaacggtaaagcagattaccaacatggtgtatcgcggaaaggaaagcctgcgaaggcttctggaacgggaggggattacaaatgcggagtcatgaagagcgcgtcgcggagacaaagcggcgcatcgccaagatggagcgggagaaacggctgcggcgcaatacggtcaccgcggcttccgctgtggcggcatgccttgcgctgattgtgggtgtgtctttcgtcatgcctgatattgccgtaaaaactcaaaccggcggctatgcgggctttgaaacggcggcaagcatctttcacggcggcgcggccttgggatacatcgtcatcgggcttctggcgtttcttctgggcgtgtgcgtgactgttttgtgcttccggctgcggcaaatgaatcgggacgacacacaggataaggaaagcgaggaacggcatggagctgattgagaacctgctgcagctgctggtcacgttcgtcggcgcgctgctttcgggcatatcctaccggaaaagccgcaggcaggcgtattttctgctgctgtgctttgtgtttgcggagtacttgctttggacggcgggctgcttctggccggatacttccccggcaagccccgtcttctggtgcgatatgctgctgacgctgaccatattggggctgctgcccgccgtgagaaaggcggtggacgcatgacctatattgaaaacatatttctgtgcatggtgtccccgctgctggtagctgctttgtgcatgggcaggcggcatctccgcttttttctgttctgcatcgccggaatgggtgtgtgcctgctttcggcctacatcaatactttcctcgcgtcggtatgtcaggcggacgcccttgccgccacggtggagattgcgccggtggtggaggaaatgatgaagctgctgccgctggtgttctatcttctggtgtttgagccggagggggataaaatcaaggctgccgcaataacagttgcccttgcctttgccacctttgaaaacgtgtgctatctcattcagaacggagcggaccgtttctccttcatcttcttccgcggcttcggcacgggcgcgatgcacgttctctgcggtctgatcgtgggcggcgggcttgcctatgcgtggcagcgaacgtggctgaaaattgcaggcacctgggggctgctgggcgcggccatcaccctccacgccgtttacaatctgctcatcgcctacggcggtgcggcgcagtatgcggcctacgccctgccggtgctgctggtagcggcgggaaggttgtccgctttccgcttatcgcggagaaaataaccgaacattcactccttgagagctgctttttggcggttctcaattttttttggaaaattttgcgttttgggtgagagtttttccgattttatgtacctatataagtgaaagggtttttaggccacagtttcagacaaaccggagaggagggtcaaactgtatgtacgataccgcaagacgggtcgcactcgtccggcagcgggtacggaaaaacacccgccgaaggcagcagcacggcatatacggactgagtgccgcgtgtatgctgctgttcgcggtgctgatgcaggcgataagcacggtcgtcaggccgggacagaccgccgcatggggcgtgttcggcgcgatgctgctgcgcgaggatgcgggcggctatgtgctggtggctgttgtatcctttgccgctgcggcggcaatcaccgcgctgtgcatgcggttcaggatcagagaaaaccggaaaaagggcgggacaggcaagccggacccgcaggaacaggagggaaaaacgacatgaagaaacgaatactcagcattctgctcaccttgtgtatggtgctgactatgatgcccgcgacggtcttcgcggcggatggagaggttgccgcacgcgcatcggaaacgggcggcctgtatgaacaccacgaggcctgcggcgcaaactcggcaggggcatccgatactatgatgccaaaaacgaggagcggggcagtccgtcccgctgccacccaatacacctatacgctgcattacgatgccaacggcggcagcggcgcgccgccaagtcagagcgtgattagctcggaatttcatgtatgggtccccatatcggacaaaattccgacccgtgacggatataccttcatgggttgggcgaattctcggaccggtaagccgatatatggcggaaacggcggttataccgagtgcctggtagtacatgggtatgatatgagcacaaccatctatgccatatgggaggtgcacaaccatagctggggcgaatggacctccaacggcaacggaacgcacacacgcacctgtatcgcggacagcagccataccgaaacaggcaactgctccggcggcaaggctacgtccacggagaaggctgtttgcgaaacctgccataaggcctacggagagcttttgcagcctgccaaaacggtcatcaccaccccgcccacgctgcgccttccggcctatgtcggcaatgagtacaccgacaaggcgctcatgggcggcgaagcgaaggccgaggggacggacaccgttgttcccggcacgttcggcttcaagtattatgaaggcggcagagtacacccgggcgaaaaccgcatggtgatcctctttacccccaaagatacggaggcatacaccacggcggaatgtatccttaccgtggtggggacaaagcgcacgatcacaagagtcccggacgacgtgatcatcacggacaagcccattggcacggcgtttgaggatctggggcttccccttttccctttcggcgtcaaggttgagaccaacaccggcgcgagttacagtcccgtgcccgtgacatgggacggctccacctatgacccgaacaaatatggcgagcagatcattaccggcaagctgcatgttgaaaggagcggcttcacggatgatctggagccgacaagcacagtcaaggcaaccgcaaggataacactcattgacgaccgtgtctttacgcccacgctggagccgcccacctattccaagcagctctacggcggcgacctgtgcttccttgtgtttgccgataaatatctctccggcggaacggccacggtgaacggcgaaacggtttccggcaaattcacgctggacaaagatcagaaaatatacggacattccttgacggcgagcacgctattgcaggcggggcagctgcaactgaagatcatcttcacgcccgacaacctgaagcggtataacaaggcgaaatgcaccgttgatgtgaacgtcgttccccgcacattcaaggagaccagggccggacacattaccaatgaaaaattcggaacgccatttgaggagctgaatctctcggattcattcagcttttatgcggtgggcgatgaaaaagatcccgagggaacagggatggacttcggtatgaatgtcgtcacctcatgggacagctcgacctacgaccccaattcgtttgaggagcagaccatctacggcgaagtcaaccgcgccgaattggagaagtatttcaccataccggaaaacgccgacctccgagccgtgagaaaggttcagctgcagcctgacccgaccgagacggagatcacgcagctgcccgtattccgatggaagaacggcgattttacgttgcccgacaacaccatattcacttggcgaaagcttcaggtgggaacctacaacgatgaagtcggcacgctcgtcggcggcgtggcaaaggtcaagggtacggataccgtcgcccccggcacgttctccttcaagaatgccccgccgttctacctccagactccgggtgaacacgatgtgacggtggtattcacgccggacgacctgcgtctccacaagccgacggagattaccatcaaaatcaacgccatcaaaaacaccatcaggaatatcgatgaaccggatcccattaccgataagccgttcggcacgccctttgcagagctcggcttgccggaaaatgtgtgcatcaatgccgttgacggcgcatggcgctgggtcgacgtggcatgggatgaatcgtcctatgatgcggagtccgtggattggcagaccatcaccggcacgccggtgcttagcaatgatgacggagacatctttcagcagccggagcctgcggtaacagccgcgattcgggtgaagcttatcgataaccgaccccctatgccaccgacaatcgtcgcggaaagcctgcccgacggcatggaaggcgaggcttacagcagccgcttgaccgccaagggtaccgcgcccatcacatggagcattgtgagcggcgtcctgcccgagggacttagcctaaacgaggacacaggagagataagcggcacgcccgccggggaagggaccgaggtctttaccgtcatggcggtcaacgctttgggtgaagatattaaggagttttccatcacgatagccaaggctcccgagacggaatacgccgtcatcgtcagggacgacggtcacggcacgggcagcgcggatcccgcctcggcgacggccggaacggaaatcaccctgaccgctgcgccaaacgcgggctaccattttaaggagtggcaggttatgagcggcgacgtgacggtaagggacgacaagttcaccatgccgagcgacaacgtggagatcaaggccatcttcgaggaggatgcgccgcctacgcccacggagtacaccgtcacctttgacggaaacgacggtacgccctctgtcgacagcatgaccaccaccaagcagaagctaacctctctgcccgatgcttcccgcagcaagcacagcttcaacggctggtacaccgaaaagagcggcggcacaaagattacgacggataccgtgttctctgcaaataccaccgtctacgcccactggacgcataccggcgacaacaatccgcccgtcaactactacacgctgcgctttgaaacaggcggcggcagtgctattcccggcgtgcaggaaacgtacaatacctacattgatttgaccaagtatgttcctactcggcacgggtatacctttgtcggctggtacagcgaacggagccttgtgaacaaggtctcagacatttatctgaccggggataggactgtgtatgccggctggcgcgcggttacaatcccgcagaccggtgacagcggtcaaatgaatttatggagcaccgcgctatgtgcatcttttgccggatgcgttgcactgatcgtatggaaaatcaggcggcgggagaaaaaatcactgtaaatccttaaaaagtaaaagtcttatcttcccagaaaagcaggaaggctgttcttcaaaagaacagccttcctgcttttccgcttgatgtgtatgcacctgaaatcatttctcaaacaggtacaggaggtacccgtagccctcggcctccattttttcataggggacaaagcgcagggccgcactgttaatgcagtagcgcacgccattgggggactccggatcgccggtgaacacatggccgaggtgggagtctccggcgcggcttctgacctccgtgcggcgcatcccgtggctcagatcctctttttccaccacggcggggccttcgatgggctttgtaaaggcgggccagccgcagctgctctcgtacttatccgtggaggaaaagagcggctcaccggtcacgacatccacatagatgcccttttcaaatttgtcccaaaactcgcccgtgaaggcgcgctccgtgtcgttctcctgcgtgacgcggtactgctccgccgtcagcttgtcccggatggactctgccgcgggcttctgatagtcgcccgggtcgatgcgcagtttggagaagagttccatctccgcgcgcgggatgtggcagtagccgtccggattcttttcgaggtagttctggtggtattcctcggcgggatagtagttcttgagcgggccgatctccacgaaaaacttctcgctgcggccgcgctcgatctccgcgatgcgctccaccgtctccttcgcgctttcgttggtgtagtagacgccggtctggtactggctgccccggtcgttgccctgttggttttgtaccgtggggtcgatcacatagaagtaggccaacagcagcgcatcgaggctcacctgctcggggtcgtattccacccgcacggtctcccgaaagccggtctcgcccttgcaaacggtcttgtaatcggcgtccgcctcgcaggtgccgttggcgtagccgctctcggcatcgatgacaccggggatggactgcatcagctgttccatgccccagaagcagccgcccgccagatagatgacattttctgtggtatccatataagtgatctcgtcgtcggaccggtcaaaggccgattcgtccatggttgcttcctgtccgcttttttccttcggcacagtctgctgcccgacggcgcagccgctcagcagcagaaccgaggcgaaaagcagggccaatacgcttcgatacatcgcgtttcctccttttagaagaatcagggcttacgccccccttcgcccgccaagggcaatgcaatggcgtgcagcaggcactttttaaatttcgggtcagcctgcgtcggcggcgagcgccttgtcgatctgggcttgcagcgcctccgcttgatttttttccgtgatggcgcctacgatggggtcgcccacgatgttgccgttgcggtcaaccacataagtagtaggataggcaaagatgttggtggtaaactttcccgcctcaccatcggagttaaaatacacattctgataggtcgcgcccttcttggccagtacatcctttgcttcggaaattgccgcttcgtcgccgtccagcgtgaaggtgttgacgccgatgagggagccgcccttctccgcaagttctttgttcagcgcgtccaggtcggaaagctcgcccacgcagggattgcaggttgtgaaccagaaattcaccacggtgacggcgttggcagagaacagctcgtcacttttcaccgtatttccatccaggtccttgccctcaaaggtggggaatttctgcatgctgccgtcatcggatttctgcatactgccgtcatcgggcggcgtggtcgtgtcgttgcctgcgggcacgctcatagcgccatccgtagattcctgtgccgcttcggggtacttttcctcaatcatggtcagctgggtttcaatgtcgcggatcttctccgccccctctttgagcagcttcagctcatcctccgtaaactgatccttagcggattcgattgtactgagcaggaaatcaccgtagtttttgccgtcctcctgcatggtcatgcccttgtcggctgccatgaataccttttcccaaagggctttgttctctgagagaatggtgttttcctgcgccatcagatctttgtgcatggcaaccgcttcctcggcattcttcggttcgctgctcattccgtccgttttgtctccgttctttgtgccgcaggctgtcaaagacagcatcatcagggcgagaagcagcagtgccagcaatcggccggccgtatttgttctattcattttcatctgttttgtttctccttgttattattgtttattattttctgcggctttttttgccgcttttgttttatctttaccgtctccgaagccgtaacggaagcgcacggcgcccgtcggacaggtgcgtatgcacattccgcagcggatacactcggtatggttgggcgcttttgttacatccacatccatcttgcaggctttggcgcattttccgcaggatacacacttgtttttgtccacctttatctgaaagagagatacccggttgaacagcgcgtaaaacgcccccagcgggcaaagccacttgcagaagggacggtagaatattacgctcagtacgattactgtaagcaggacgctgaatttccatgtaaacaggcttcccagcgccgaccggataccggaattggcaagggacagcgggatggctccctccagcacgccttgtgggcagaggtatttacagaagaacgggttgcccatgcctacatcgtttacaaggaacgccggcagcaggaaaaccatcaccagcagtacggcgtacttgaggtatcgcaggggcttgagtttctttgtggagaacttcttcgtgggaattttatgcagtagttcctgaaaccagccgaaggggcacagaaaaccgcagataaagcgtccaagcagaacgccgagcaaaatgagaaagcctgtgatataataggaaaaactgaatttagaagaacccactaccgcctgaaacgccccgatgggacaagcgccggaggctgccgggcaggagtagcaattcagcccgggcacacagacggttttccctgcgccttggtacagtttgcccttgaggaagttcggcaggtgcaggttggtcaataaagttgcccctgcctgtatccagccgcgaaagcgggacataatctgtgacgcgcccgaaaacttcttacccaatgcctacacactccaaacataatttaatcgctttgctcagtaccgtcgcggcctcgccgcgccatgcgccgaagcacagcatggcgatacccacaaccagcaacgtggcctgcgccgctgctttttttgcacagctcaattttatcaccctttcactttttctgccatcatcatagcacaggaaagataaaatccctgttaagaacgaaaatttaatgcagatcttatctgcttttgctataataaagaaaaaggaaatgaaaagggggactcttatgcaccttttggtaattgaagatgaacgcgccctatgcgagacgattgtccgcagtttgcggcgcttggcatacagcgtggactactgctacgacggggaaaaggcgctggaacttctgggtgtggagcgctacgatttggtacttcttgatctgaacctgccgggaaaggacggcatgaccgtgctgcgtaccttgcggcagacagaccgcgagacgcgggtgttgattctctccgcacgcggcgaggtggaggacaaggttgaggggttggatgcaggggccaacgactatcttgcaaaaccctttcacttggctgaactggaggcccgtatccgcagcctgaccttgcggcagttcacccagcaagccgtgttgctgacctgcggggagctgacgttcgacacacgctcccgcaccgctgccgtcaacgggcagcccctgacactcacacgtaaggagacaggcattctggaatatctgatggtgcatcagggacggcctgtgagtcaggaagagctgatggagcacgtctgggataacagcgtggacagcttcagcaattctatccgggttcatatctccgccctgcgcaagaagctccgcgccgcattggggtttgaccccatccgtaatcgcatcggcgaaggctatttgatgggaggagaggaaacatgaagcgactttccttgcagtggcgcatcaccctgatgactgtcctgctcatcggtgtcacctgtgttgtcatgaatctgctgctttgttcctccggtgtgtactatatggacacaatcgcggacaccttacagggaggcgacacggttattatgaacagtgaaggcgcagagagctttaatccgcagctcgtaacgcccgatgaggatctgactatcgttgtcaacggagcgcaggggcgctttcgcatgaccaactggtatattacggctgtggtgacactgcttagcggcgttctggcctattttgtcagcggacgcgcgctcaagccgctgcgcagctttgtatctcaggtggagaaggtgcagctgaacaacctggcggatatgaggattaacgagaatgttctgccggagtttcggcagctgagctgctctttcaatcagatgctggagcggttggacaacgcctttgccgcccagcggcagttcaccggcaacgctgcccacgaactgcgcacgccgctggcactgatgcaggcgcagctggagctgttctccgcggagcatcccgatatgctgccggaaacgacgaagtttctcgcacttttgcgggaacagacggagcgactgacacagatgaccaaaacgctgcttgaaatgagcaatttgcagcaggtggcgcgaaacgagcagattcagcttgccccgatggttgaggaggtcttcacagatctcgcgcttttggcagaaaagcgcaatattacgctggagatggagggagacggcttcctcatcggcagtgatgcactgatttaccgactgctttttaacctgacggaaaatgcagtcaagtacaaccgttcgggcggctcggtgaaggtttctgttacgcagaagccggaaaagcttctgattcgcgtttccgacaccggctgcggcgtcccggaggaataccaacagagcatctttcaacccttcttccgggtggataagtcccgcagccgggagtacggcggcgttgggctggggctttctttggtgtgggagatcgccaatctccacggtggttgcgtccgagtggaggagagctcgaagaagggcaccacgattgcggtggagctgccggtacagggataaggcacgcagaatctccggtgagccgttcgcggaatacgaacagatttagaaaagcagcggttttgcgatgaacaggagggaaagtgatgaacacatgaaaatcctatatgagctgtcttggttatgggaaatgctgggcatcgcgcttgctgctgcagctgtctgcgtgacttgtgccgcactgatttgcaaagcaacgaagaggcggcccaacaaaaaaatgctggcagtcgtaggggcggcagcatttgccggtgcaattctggcagtccttctgattgcgcggacaccgatgccgctttgaagatatttaatccttcggcagcttggccgacaacacgaagaagcttgcctgcacaatccgtggccggagaatatataggctgtcaaaaaaaactcatgctttcaagcggtgaaagcatgagtttttcagtgtgccggtatggacagccgctggtgtggtcggctttttacctgcgatttcattaaatgtgtcgttttttaaggagcagggcgagtgccgcgaggctgcctgcgcagagcgtcagccaaagtgtgggggcaaaatcatcgcccgtttttgggtggttcgtcgggcttggggttgcggtcggcacggcagtcggtacggctgtgggagctgccgtaggtgtcgccgttggttccgctgtgggcgtggccgtcggttctgcggttggggttgccgtgggctccgctgtgggcgtggccgtcggttctgccgtgggcgttgcggtgggctctgcagtcggtgttgccgtcggttccacggtgggggttgccgtcggttccggggtcggggtcagctcgggcgcggcgatggtgaaggtgatattcagcccgtctccgtcgcgtgccagagacaagtccttgacggatgtacctgaagacgaagggtactttacggagcctgttacggctgttactttataatttcccggttctaacgtgtagggaatcaaaatgcttacccgtgtagaagctggtaatatgtcatcatcctcgtcaaaatttacatatgtgaatgtcggatctgtgtcgatcaccgcaccggtcagtacggttgtatcgccggtatctgtattcgtaacggtgaaggacgtgtctgctgacagtgacagattattgatggtaatatcccgtgacggttgagtactggctcctttggatacgagcagtgtaaacccaatgcgcagctgcccgcttgtaggccccggctgtcccgactctgcgcctacgatcaccacgtcctcttgttgacagcctgccactgagagcagagcgaacagcagaatgaacacgactccgatttttatacccttgtttttcacggcgttacctcctcataaatttgaacggtgtttgttgtgttcattataccatgacatggggggaacgtcaattagaatatgcttagaatttattcgtttttattttacagcgggcaaaattttccgttgcagcgggcaaaacggtttttcttgcaaatgggtgttgctatctgccgtggggtatggtaaaatcaagctgtatgacccgtttgttctataataagaagaacgaggaaaaagagaggattggttcaaatcatgaaaaatataaaaaagctgctggctgttctgctggccgcgctgctgtgcgtatctgtgacggcctgtgcaaacaacagctcttcaagcacggcggtcgcaacgctggagacgtcttccacggcgagcgagggcgagaccgcggagagtaccgacaaggaccctgcgggctatgacgacgacattcagggcctttgcaagtatcttgaagactgcaaggcggcagcgggcgaaaaggtgcagatgtcttacgatgtcatcggcgccgaaaacggctataaatatgtataccgttacgcagattccgctgtgcagcttgaagtgtatgagttcccggcggagctttccgagaccgctaaggcgcttctggacgctgtgcgcgcagacggcacctttaaggtgctggataacaccgttccgggttatctttccaacgacggccgcttccttttgatctacaccgatgcgaagtcggaaaaggaagacgcgaataaaacacacaaggagcacgttctggagtgcttcaatacgtttgcggacgcaaaggcaaaataaaaattttagggggcggaaaggcatgtgcttttccgtccttagtgctttcttattttaaaaaatcggcggcggttaggcataaataggcatgaaacgcgccgaaaggggagttgtacaccatgaacacacaagataccgtgcaccgcaaaagcgccgcagagctgcgcatacggcgcgtgatggacgcactggagaaaaacaacatgcaggcgtattatgcgcccacgtgtgcggacgccgtaaaaatcgcaaaagagctgctgcagccgggcgatgtgatttcctgcggcggcagcgtgacgctggatgagaccggcgtgatggatttaatgcgctgcggggactatgaatttttggacagaacaaccgcgaaaacgcccgaggagcgcgagaagctgtaccgtgaggtgttttcctctgatgtgtttttgacgggcacaaacgccgttacggagcacggagagctctataatgtagacggcaacggcaaccgcgtggcggcgatgctgttcggcccgaaaaaggtgctggtttttgcggggtgcaacaagattgtgcgcgatatagacgacgccgcaaaacgcgtgaaaagctgtgcgacgcccgcaaatgccatgcggctgaatttggacacgccgtgcacgcacggagcgtgtcccggcacggacggcgagctgtgcgcgggctgctgctcggaaaatcgcatctgcgcgatgtacacggttttggcacgccagcgcgtgaagggcagaattcatgtcattctcatcggtgaggaggtcggttactgatatgaaagaaaagatacaggcttttatggcgaaacgacaggcaaaaggaaagcggtcctacgagatcgacatgtgcaacggtccgctgctgggcaaaattctgcgctttgcggtgccgctgatgctttccggcgttttgcagctgttttttaacgcggcggatattgtggtggtcggccgctttaccggccacacggcgctggcggcggtgggctctaccggcgcgcttatcaatttgctcatcaacgtgttcatcggcctttccatcggcacaaacgtgcttgtggcgcgctattacggcgcacaggatgcaaagcagctgagcgagaccgtacatacctctgtgctgacaagtcttgtgagcggcgttatattgattgccgtgggcgttgcgtttgcggagccgctgctgaccctgatgggcaccccggaggacgttttgggtcaggcggcgctttacatgcgcatatactttgtgggcatgccggcgatgatgctgtacaacttcggcgcggcgattttgcgctctgtgggcgacacaaagcgcccgctgtactttttgaccattgcgggcgttgtaaacgtcattttgaatctgttcctcgtcattgtgttccatctcggcgtggcgggtgttgccattgcgacggtcatttcgcaggtgatttctgcgggacttgtggccatctgcctgatgaaaacgaacgcttcttaccgtttggagctgcataagctgcatatctataaagataagtttttcggcatgatgcgtgtcggcctgccggcgggcatgcagggcgcggtgttctccatttcgaacgtgctcattcagtcctctatcaactcgttcggctctaccgttatggcgggcagcacggctgcggccaacattgagggctttgtgtacactgcgatgaacgcgttttaccagacggcgctgtcctttaccgggcagaacatgggcgcgaagaaatacgaccgcgtggcgaaaattctgcgcatctgcattttgtgtgtgaccgtgacgggcgttgtgctcggctgcggcgcgtatttgctgggcacacctttactttctatatatacgtctgacccggaggttatccagtacggtttggagcgtatgctcattgtgtgcgtaccgtacttcctttgcggcattatggacacgcacgtgggcgttttgcgcggtatggggtattcgatcatgccgatgattgtatcgcttacaggtgcgtgtgcgctgcgtgtggtgtggatcctgacggtcttccagatgaaccgcacgctgttcatgctgttcctctcgtacccggtgacgtgggccgtgacggcggccgcgcattttgtgtgctaccttatcgtgcaccataagatgatggaaaaggcgaaagcggagcaggccgaggcggcaaaagcataaagtatacttatatatatagaagaaacgcgttgtgggatgaccgcagcgcgtttcttctatatataaagagaaaagcagaaccgcaaaaaacgcgtcttcctataactatatataagaagatatagggttgcattgtaaagctttacgataacttcacggcgattttaagtgttttaaaaacttttttcggataaaatcagaaagattatgaggaggttcagaagtgaaaggacactgatgcgccagatatataagaagatgtgcttgaagctttggggtacagagaggggcttttgcaactttaagaccaccttttcaaaaagtttttcttgattttttcaaaaaaatttcgtaaaatagtttgcgtaagccatgtatatgggcatgtaaatgcaaaaatgcccattcggagatacactatatattgtgtttgaattaaggcgtaacatatagatgtagtttttcgaaaaaaacttaaaaaaactttcaaaaaagtgttgacaaaaggggttgtacgtggtattatagtcaagcgctcgagagagacggcaaaaaactgaaagcgaaaagcttaaaaggaaagccgcttgaaagagagcacaggaccttgaaaattaaacaacgagagaaagaatggaacctgtaatttctttgagagactcaaagaaacttacgagaaacagaactcaacaaatctgtgacgaacgtcagaacgacgttatg

SEQ ID NO: 13 - DNA, 318391 bp, Intestinicoccus colisanans
  source 1..318391: mol_type = genomic DNA
  misc_difference 317900: note = n is a, c, g or t
ccggacggtctccctccaagccaagttccgcttcgatttccctgtggttcttccctgattctaacatcttttctatggtcggtagtagaacctgcatattggtgtatcttcgtttgctcataatgaatcccccctgatgtacttattatcctacatcaggggggattttgtctattgtcctgttttactggttctgttcaaattcctgtgcgggggatcaacgttttatgacgttttcatgcggtttaagcgctcttcattagtacatgccgcccatgtccggtgctgccggagctgcgggtgcagccggctccttgatgtctgccacgagggactcggtggtcagaacggtggaagccacagaggaagcgttctgcagagcggaacgggtgaccttcgtcgggtcaacgatgccttcgtcgatcatgtcgccgtaggtatcggtcagagcattgtagccgtagccgacggtgttctttgccttcaggtgctcaatgatgatggagccctccagacctgcgttcgcagcaatctggcgaaccggctcctcaagagccttcagaacgatggcagcgccggtcttctcgtcgccgtcaacggaatcgacataggccttaacagccggaatcgcatcgatgagtgcggtgccgccgcctgcgacgatgccctcttcaacagcagccttcgttgcagccagagcgtcctcaatgcgcatcttctgctctttcatttcgacctcggtagccgcaccgaccttgataaccgctacgccgcctgcgagctttgcaagacgctcctgcagcttctcacggtcgaaatcggacgtggtggtctcgatctggcttctgatctggctgacacggctcttgatagcctcgctgtcgcctgcaccgtcaacaatgatggtgttttccttgtcgatcttgacctgacgtgcacggccgagctgatcaacggtggtatccttcagctcaaggccaagctcgctggagatgacctgaccgccggtgagcgttgcaatatcggtgagcatttcttttcttctgtcgccgaagcccggagccttaacgcccacgcaggtgaacgtgccgcggagcttgttgaggatcagggtggtcagcgcctcgccctcaatgtcctccgcgatgatgacgagcttcttgccggactgtacgatctgctcgagcagcggcagaatctcctgaatgttggagatcttcttatcggtgatgaggatgtacgcgtcgtcgatgacagcgaccatcttgtcggtatcggtgaccatgtacggcgtaatgtagccgcggtcgaacatcatgccttctacgacctcgctgtacgtctcagccgtcttggattcttcaacggtgataacgccgtcggacgtgaccttttccatcgcgtcggcgatgaggttgccgatctgctcacttgcagaggaaacagctgcaacacgggcaatgtccttcgtgccggagaccttcttggcgttcttctcaatcgcctcaacagcggtctcggtcgccttctgaatgccctttctcagaaccatcgggtttgcgcctgcggtaacgttcttcatgccctcacggatgagtgcctgtgcaagcagtgttgcggtcgtggtgccgtcacctgcaacgtcgttcgtcttggttgcaacttccttcacgagctgtgcgcccatgttctcaaacggatcttcaagctcaacttccttagcgattgtcacgccgtcgttcgtgatgagcggtgcgccgaacttcttatcgagcacaacgtttctgcccttcgggccaagggtgatcttaacggtatctgcaagcttgttgataccgccgagcaatgcttttctggcttcttcgccgtaaatgatctgctttgccataataaattacctcacaattccaaatatcaaaaataaagactgaaactcaaattactcaacgactgccagaacatcggactgacgaacgatggtgtattcctcgccgtcgatcttcacttccgtgccggtgtacttgccggtgatgacgcggtcgccggccttaagctgcataacaacttccttgccgtctaccatgccgccggggcctactgcgataacacgggagatctgcggcttctcctgtgccgcgcttgtcagcacgatgccgctctttgtggtctcctccgctttctcggcctgaatgagtactctgtctgtcaaaggcttaatggtcataacttccacctcggcgcctaatgcgccgtatcctttctccccgcagttcataaataaatttttcgcgtacagcggggtgcgccgcgaaacccgccggggtgcggcccggtcggtaaagaaatacaagtttaggtctcggggaactgtgccgcttacgctttagcactccttatccccgagtgctaaacttattctaatcacttggtcaagaaaagtcaataggaaaatcgcgatttttttgacttttaacagttccgtaataattttgtcctccgatgtcctctgatgtccgcttttttcatacaaaaccacccacaaaacgacaaaaaaacagccccgcgctcgtttgaaaccgggactgtcttttgcaaatacagcttaaatcatggaggcatattcgtcaaacggggctaagctccgctttaaaatgccattgatatatgcaatgagaatgccgtagttcgtgtacggcacgcctttttcttcggcggaagactgtctgaactgcatttcgcgttcattcagcatacagccgccgcagtgcacaataagggcatacggcgaaagatcttcgggaaatccgccgccggaggtaaactcgaattcaaagtccttgccggtgtgtttgcggatccatgcgggcagcttcacggtgccgatatcgccgcactggcggtgatgcgtgcagccttcggagatcaaaatacggtcgcccgctttcagattctcaatagccgccgcgccgcgcacggccgtctctaaaacgcccttgtagcgcgcaaataagatggagaatgacgtgagcttaatgcgctcgggcacgatctgctttactttgccgaatgcctggctgtccgtaacaacgagcttcggcggcgttttgaggccgttcagcacgcccgcaagctcttccacctgcgtgacagagcatgttgcacccgcgtccagaatgtcgcggatggcctgcacctgcggcaaaatcatgcggcctttcggcgcggaggaatcgatgggcgtgacgagcaccacgtggtcgccgcgctcaagtaagtcacccaaaataactttggtgttctgcccctttgcagcgatggcggcaagcttttccttgagctcaaaaatatgctcgcccgtcttcgcgctgaccgcgatttcgttgtcattttcatctttgaagccgccgaggtcggctttattcaatacgatgatatacggcacgccttttttctcgatgagcttttgcagtgcgaggtcttccgcacttttgccgaccgtgccgtcgatgacgagcaccgcaatatcagctttattgagtacctgccgggcgcgctgcacacgcagctcgcccacggtgccctcgtcgtccatgccgggcgtgtcgatgatgacgaccgggccaagcggcaaaagctccatggctttctgcacggggtcggtcgtggtgcccttgacatcggacacaatggagatattctgccccgtaacggcgttcaccacgctggatttaccggcgttgcgcttgccgaaaaaggcgatgtgcacacggtttgccgagggggtctggttgaggtctgccatagaagtcgcctgccttttaaagaataaccgaaagttttagaaacggaagtcgcgctcgccgtgggcgaccttttcaacgtagccctttgcgatgctgcgggtcttctcgttcgggatattttcaagctcctgcgcgatcatcttttcgccgatggccttcgtctccggggaagcgtagtcctcgaggaattcttttaaggtgatgagtgcgttcgggtggcagcagttctggatctgtccgctcttacacaggctcatgaagcggtcgccggtgcggccctcgcggtagcatgccgtgcagaaggacggaatgtggtcggtctccatcagccagcggacgacctcgtcaagggagcgctgatcggaaacgtcgaactgctcggtgtcggtggggcgctcctcttcggcatagccgccgacggaggtacgggatgcgccgctgatctgcgaaacgccgagattgataacctgcgcgcgtaccttctgactctcacgcgtggagatgatcatgccggtgtacggcacggcgatacgaataagtgcgcagattttcgcgaatgtttcgtcgctgatgccgttatcaaacttcgtcgggtcaatgtcgtcggcttttttaaggcgcggcacactgatggtatgcgggcctacgccgtgcacggcttcaaggtgctccgcgtgcatcagctggccacagaactcgtaacggtacatttcaaggccgtacagaacgccgagacccacgtcatcgataccgccctccatggcgcggtccatcgcctcggtgtggtaggcgtagttatgcttcgggcccgtgggatgcagcttttcgtagctttccttgtggtaggtctcctggaacagaatgtacgtgccgatgccggcttcctttaatttgcggtagttttccacggtcgtcgcggcgatgttgacgtttacgcggcggatggcgccgttcttatgctgaatgctgtaaatggtcttgatgcagtcgagaatgtactcgatggggttattcaccgggtcttcgccggcttcaatggcaaggcgcttatgacccatgtcctgcagcgcaatgacttcctttgcgacctcctcctgcgtcagcttgcggcgcgggatgtggtggttctggcggtgatacgggcagtaggtgcagccgttcacgcagtagttggaaaggtacagcggcgcgaacatgacaatgcggttaccgtaaaacttgtgcttgatctcgtttgcaagcttatagatttcgtccagaatctccgggtcttcgcaggcgagcaaaacggatgcttcgcggtgtgaaagtcccttacacagacgggctttatcgagaatttcgcggatgagcggcaggttatctttgttctcgtccgcgtattttaaggtgtcttcaatttcttcgtggcagataaattcctctgcttttaaggatttcggatcgtacataatttgaattttcctttctttcgggtcagttcactttcccgttagtcattttttcggatcactccgttttgatttccggctctgtgctcgtgaaattggaatacgccgttttgatgttggcgccgcgcacgcgcccgagctttcccgccatggcactgatgacatcctgtggggcatccaccgccacacagatgatgttgatatttttctgtctgtacggcagccccatacgtccgatgatgtaccggccgtacaggtgcagaatgtcgttgatttcttccgcgtgggcgttatcttctaaaataatgctcatcacggctacgcgtgtctgcataaaacacctcccgtttttataaaacaagcaaaacaaaaatgctccctgccgaaaatgcaggaagcacaaaaagcgcagaatctatctgcggaatatacctctatccattttcggcttacacgcggcgatgccttgtgctcagaacgaaaaagctgttttgcggcgcaccgcagaaaaaactttggtgaaccgtgttttgtatagtataacggattttcagaagtttgtaaagagcggattgcaaattttgacaacgaaaaagccccggcgtacagccgaggctctgtttgtttcaaaaattacgcgtccagcatggtaatgacgtgcctcgggcagacctcggcacatttgccgcagccgatgcactttgcgggatcgaccttcgcgcagaagttcgttacctttacggcgcccacttcgcacgccttcatgcacttgccgcagccgatacagcctaccttgcaaaccttcatcgtctctgcgcccttatcacagttggagcagcgcacgaccgcctgctttttcagcggcacaaagctgatgagccccttcggacatgcagcggtgcattttgcgcagccgcggcactttgcggggtcgattgacgccatgccgttgcagacgttgattgcgccgtattcgcacacggcggcgcagtcgcccatgcccatgcagccgtagcggcagctggagataccgccggcaagcagggtagatgcggcgcagctatcgatgccgtcgtagcgcattttgtcgctggtgcagtcatagttgcccatgcagtggacaagcgccgtctttttctcgacggcaacgtcgcccgtgccaagcagctctgcgcacgctttggcgcacgcttcgccgccgggagaacacagcccgggctgcgcttcgcccttagagagcgccgccgcatagccggagcagccggaaaaaccgcacgcgccgcagttcgcgcccggaagcacctctaaaatcgcttccgctttctcgtccttcggcacggccatgatggcggaggcgaccgccagaataatacccgccagaagaccgatgcccgcgacgatcagaaccgggatcaaaattttatccatatagaaacccctttcgttttgctcaggcgagcagacggtctataatgccgttaaagccgaggaacgaaaccgccacaagcgacgcggcgatcagcgtgatcggcaaacctttgaggaaattcggcacgtcgcacagctcgaggcgctcacgcacaccggcgaaaatgaccattgcaaccatgaaaccgatgcccgcgccgaacgcgttgacaagcgatgccaaatagccgaagctcgggttttccgcgcctttttcgagcacgagcatcgtcacgcccagcacggcgcagttcgtcgtgatgagcggcagataaatgccgagcgcgttatacagcggcggcatatacttgtgcatcacagtctccaaaagctgcacgagcgccgcgatgatgaggatgaacaccacggtctgcaaataatcgaggttcagcgggacaagtacatacgtatacaccggccatgtgaccgccgtcgcgataaccatgacaaccgttacggcgcagctcatgccgaacgccgtattgagctttttggaaacgccgaggaacggacagatgccgagaaacttattgagaatatagttctccgtgaggattgcggcaaggaaaatgccgactaaaaatttaagactcatgctttgccgccctccttttcacatttttcctgtaccttagagcaggaagccgccaacgggcatgcagcgcagcccatggtctccggtgctttgccctccgtggaaagcttgcccgcaatggcgatgagaataccgaacacgaagaagccgcccggcgggagcaggaaaatgatgatgggatccatgaaattcgagaggagcggaatgccgaacacggtacccgcgccgagcaattcacggatgatgcccatggcgagcaacgcggcggtgaagcccacgcccattccaagaccgtctacgatactcggcagcacgggatttttgctggcgaacatttccgcacggcccaaaatgatgcagttgacaacgatgagcggcaggaacacgccgagcgacttgttaagcgccggcacgtaggccttgatgagcagctgcacaatggtaacaaaacccgcaacaatggtgatatacgccgggatgcggactttatccgggatgatttttttgagaagagaaatcacggcgttggaacatacgagtacgaatgtcgtcgcaaggcccatgccgatggcgttcgaggccgccgtggtgacggcgagcgtcgcgcaggtgccgagcatcaggcgcagcacggggttctctttgataatgccttttgtaaattcttctttgaggctttttgccatgttatgcgccctcctttaccgtgttgtactttgtgatggcttcgttgacggcgttcgtcactgcgcggctcgtgatggacgcgccggtcatggcttcgatctcgccgtccgacggcgccttattcttcacaagcgtgatgcccttttccggcgcagtctgcttaaactgatccgtaaaggaagccttttccgcattcgcgccgagtcccggtgtttcgctgtgctccagaatgacaacgccggtgatctgcccgtcggcgctgatgccggtcataaccttcaccgcaccgccgtagcccttcgcctccgtctggaaaacgtagccgaccgtttcgttattcgctttgccgatgtaatagccgtccgcttcttcaaagctgtccgcgtcgctcaaaacgacttttctcgactgctccgcttccagcgcggactgctcggcgatcttatctttcgtaagcaggtttgtgcccgccagaagcgccgtgacgacaaggcaaatgacaaacagaatgagcgccggttttaaaatatctttcgcggtgatcttcattttgcgtcacccgctttctttgccttcattttgccgaacgtctgcggcttcgcaacgcgctcgatgagcggcactaaaatattcatcagtacgatggagtacgatacgccctccggcagagacgcgaactggcggattaaaatcgtcagcacgccgcagccgacggcatagatgacgcgtgcgctgaagttgatggggcttgtggtgtaatcggtcgccatgaaaatcgcgccgagcaagaggccgccggaaagaatatccatcagcggatcgcggccgagcagtgcggaaagcaccgctgccgttgcaaggtacgtgaccgggataaccgggctgataacgcggcgtgcaacaaggtaaatgccgccgagaatgagtgcgagtgcacaggtctcgccgaggcagccgcccgtgttgccgagaaacatatcgaggtaactcggcagcgccgcacccgtgccctcggagagaacgccgagcggcgttgcggtcgtcatggcatcggagaagctgtggtccatcggcgccgtccacgcggtcatttttgccgggaacgagttcatcagaatgatacgcgccgtcagcgcggggttcacgaagttctggccgatgccgccgaacatctgctttacgacaacaatggcgatgacgccgccgaacgccgcaatgatggggctgatggaaacgggcaggttcatcgcgagtaaaacgcccgtcacaacgcaggaaaggtcaccgaccgtctggcggcgcttcatgacgcggcgggatatgtattcgctcaaaatgcaggacgcgaccgtcgtcaggataataaccgccgcgcggaagccgaaaatgatgacggacgcaatcatcgccggggtcagcgccaaaatgacgtccagcatcaaggtctgggtggtgtctttcgactgaaagtgcggcgaggaggaaacgatgaatttgttcactttttagccgcctccttctttacatagtatttgccgaggcgaatggcctgcacgatgcggcgtttcgccgggcaggagaatgcgcagcagccgcattccatgcacgtcatgatgtcgagttttttcagcatttccacgtccttgcgctccgcgtatttttcaagctttgcgggcacaaggttcatgggacatgccgcaacgcagcggccgcagcggatacagtcggtcggctccaaaaggcgcgcttcttctgcaccgaacgcgagtaacccgttattctgctttaagaccggcagctcgtcggttgtcacggcgacgcccatcatcgggccgcccatgatgagcttctgcggttcttccttatagccgccgcagaattccatgacctcgcgaatttttgtgccgatgggcacaatgacattctgcgggttctgcacggcgctgccgtccaccgtgacgcgcttcatcgtcagcggcatgccggtgcgcatgtagcttgcaaggaacgagacggagccgatgttcatgacaaggcaacccacgtctgccggcagaccgcccgccgggacttttctgcccgttgccgcctgcaccagcaccttttccgcgccctgcgggtagcttgcatgcagctttaacacgcgcacttcgtcgttcgggtccattttcgggtcatccgcaatgcgcgtcaacgcttcgatggcgtcgggcttattgtcttcaatcgcgatgatgacgcggtgcacgtctaaaatttctttgatcttataaataccggcaagcacgtttttgccgttttcgagcgcctcgcggtggtcggaggtaatatagggctcacactccgcaacgttgacgatgagcgtatcgatttttttgtccggggggacgtttaatttcacgtgcgccgggaagcctgcgccgccgagaccgacgagacccgaagcgcgcgccgcatcggccagctgctgcttcgttttgatctccggcgggggacataccgcagggtcgtgctccattaacccgtctgacgtgatgatgacggcgtccaccgcctgcccgccgggcataatgacttttttgatctccttcacggtgccggaaaccgaggaatggatcggcacggaaacgtatgcgtcgctgtccgcgaccttggtgccgacatacacgtggtcgccctttttcacacagggcacacacggtgcgccgatatgctgcgtcatgggcagcgtgatctcatcgggcggcggcatcacgtgcgtttcggtatgcgccgtgttcttgtggtgcggcacatgcgcgccgccgtgcgtgcggaacgggcgcttcggaaaagactgttccatctttattccttcctttctttcgcgttaaaaaacagactttgccggtgcaagacacaacaaagtcacagtttttggatttattcaattttagcaccgcttttgtacattggcaatagaaaaaagcagtatttccacaattttctgacggaatatgggcatgcacattgatttgtaagctttaccgcatgcgtcgcacggacgaaatgagccccgtatcgtactccgaacgcaggatggagtaacacacattgtcaaaaatttcgccgtcaaaccgcttaaagccgcacggcataacgccctcaaagatgaatcccgcgcgctcgatgacctttcttgacggctcgttgcccacaaagtggctgatggcgacgacctcgacgttcatcacttcaaacgcgttctgcaccatggcgcgcagcgcttccgtcatgtagccgttatggcggtagcggcgcgaaagctcatagccaatcgaaatactgtccgtattatagcggcagtaatcgcgctggtacttgatcttgcccatcacttcgcccgtttcgcgcagggtgatggcaaaggcatacgggtcgtctgcggcgcgtctcaattcactctccgcctccgctggtgtagaaaccggcttggagcccgcccgcagcatggtatccgcatcggcggcaaacagcagaaaaccgctcatgtcctgcatggaaaagcgtctaaggcgcaggcgcggcgttatgatttccgcttttccgagtgtatcaccgcgcatttttcggctccttcggcaatgccgcgccgcgcggcaaaatgaaattcagtgcgtgcggcagaatgttgtattcctcgcttttcaccttgatgcacaagccgtccatattgctgacgacttcattttcgctttgaatttcgatcttcacgccgcggcggtaaacgagcaggtcggaaaatgccgggttgcttaaatgctcaccgcgcttatacttcgtcacaaggcccggaatgcgggaataggcgggctttcggatcatcacaaaatcgagcagaccgtcgtccaccaccgagttcggcgcgccgcagtacccgccgccgtaccagcgaccgttgcccgcaagcgtgaacagaaattcgcccgtaacggtctcttttgtgccgtccgcatagtaaaacgttacggtcattttgtccgcaaggtgccccaaaaagcactttgcaagcgaaatggtatacgcaagctcgcccgaaacgaacggcaagtgcttataataattcatctccgccgccactttggcgtcaaaacccacagagcagatattcacggcatcgccgtgctgcgtgcggatcatatcgatggacacagtcttgcccgccagctgattttccggattcaaaaacacttcgcgcttgccgaatgagcgcacgaagtcgttgccgctgccgcacgggtatacgcccacggcggcgtttttgtgaaactccgcaccgcgcacgacctccagcaccgtgccgtcgccaccgacagcccaaatgcgcaccgcatcgcccttttcggcggccgctcttgccagctcctcgccatggcccgcgcgctgtgtgaggtaaatttccggctcttccccgtgcgtggcatgcacggcgcggatgcgctccataaactgcacggtatggtcgtgcttgccggcttttgggttgatgatataaacattccgcatatgtaccctcccctaaagcattttttatgccttaaaatacatgtaatactggcagcggatcatgccgttgtagagcttgcggcggcggtcggcttttttgccgaagcatgtctcaaaccgctcgtccggactgatggcagcatagctccagccgcgctttggcgtgaagacgcgccccatcgttttgtagatgtcctccgccgttttcacgtctaaaagccgctcgccgtacggcgggttgcagatgacgcagccgaacgggccgtcgttgctgaagtccttgatgtcgcgcacttctgcggagatatactgcgcaacgcccgctttcttcgcgttttcaagcgtcaggcgcacggcctctggatcaatgtcatagccgaacgccaaaaagccctcatcgcgacgttcaagtgcctttgcggcaacgcgctcgttgtcccagatatttccggggacagctttccacttttccgccgcaaagtggcggcgcagaccgggcgcaatgtgcatggcgagcatggcgccctcgattaaaatcgtacccgaaccgcagaaagggtcgatgagcgtgccgtccgtgcgcacacgggaaagctttgccatgaccgccgcaagcgtctctttgatgggcgcttcgttggaattcttgcggtaaccgcgcttgtgcagccccgcgccgctcgtatccagcataatgctgaccttgtctttcataattaaaaactgaatctggtagttcgcgcccgtctccgggaaatgctccagtttatacgcctccttgaggctttccaccacggcttttttgataatggcctggcagtccggcacgctcatgagctgactcgataagcaccgccccttgaccggaaatgcgtcgtcgcggccgatccactccgtccacggcaaggccttcacgccgcgaaacaggctttcaaagcttttcgcttcaaatgtaccgagcagaacgagcacgcgctccgcaaagcgggagcggatattcgcgcgggcgatcatctccggggagcctgcgcacagcacacgtccgttttccggcgcgacattttccgcgcccatatcgcggagctcctccgctacaagaccctcaacacccaaaaggcagggcaaaacaagctgatatgtatgcaaagttatcaccattttcatttcatatatttaagtaatttttagtataccataaatcgcgcactttcgacaccgtatacagaaaaataaataaaaaaattacccgccgactttcagaaaagccaacgggcaatgaatttaagcttaatagaacgtcgcaacgggctgcgcgggcgcttcggcaggctcgatgttctgaagcgtcagaaccggacccttgcggccgtagagcttgtgccacttatacgcaacggaaaggcgcatggtgtaccactttccgttttccggcattttgtccgcgtcacacagcgtgagcagacccgcaaactggatatcctccacgcagcaggtcatcagctggcgaccgaagaagaacatgcccggcttcatgcgcgggttcacggctgcaaggcccttatactcgacgaccttgccgtcgtacttcttcggatcttcggaaaggtcacggtaccacagcgcgtaatcgccgtcttcaatctttacgaccggcgcgttgatgtcaaacggcagcggatcttcgatctcgtcgtattcgacgtcgccgttcgtgtactcgtaggcgatgtccgggcggcggctgatgccgcgcacaatcttgtggaacgccattttgtccatgtccttcgtgaaacggttgaacacgaccaactcgcagccggagagcttatccacaacaaggccgcgcatgttggcgttgtaagtgaggaacgtcgtcgcgtccgcgaacataaattcctgatagaccgcccagttttccggcatgttgtcgtacagcgttttcaactgccacatgccgttgtactcgatgagcacacgggaagcgcggtgctttttcgcgaggatgtcaagcgtttcgctcgtcagctcgtcttcgtcctcaatgttttccacatagatgttcttcatgtaggggcgggactcgtcgtactccgtctcgccttcctcgcagacgagcagcaaggtacgctgcccgttattgaaacgcttatccgcaagcgtttcgtctataaaagaggtcttgcctgattcgagaaagcccgtaaacaggtaaaccggcatatcatccatccatattccgcctttctgtaaggttcagcccgcattacgcgaacagcgcttcgatcgcggcctcgttgatgtgagaaccgatgacgcacaggcggccgatgacaccggcgctgccgttgcgcacagaggtctcctccggcacgtagtcgaagtggatccactcgccgtcccgacctgcaacgatgccctttgcacgcaggatcataccgtacttttcgctgttgtcgagctcctcgagaatgtgctcgatctcgtccttcgtgaacttgcgggtcgtctcggtgccccagcttgtgaacacctcgtcggcatgatgatggtggtgatgatgctcgtggtcgtgctcatcgtggtcgtgatggtgatgctcgtgctcgtcctcatcgtcatcgtcatgatggtcgtgacaaccgcaggtgcagtgctcgtcatgctcttcatggtcgtgatggtggtgatggtggtgctcgtgctcggtctcctcggcaaggagcttcagctcctcttcaagggtattcttgtgctccatcgtctcgagaatctgtgcgccggtgagctgatcccacggggtggtaatgatggtggcgttctggttgtgctcgcgcaacagagcaacgcaggcttcaagcttttcgggcttgataccgtccgtgcggctcagaatgatggagtttgcgtgctcgatctggtcgttatagaactcgccgaagtttttcatgtacattttgcacttgtttgcatcggcaacggtggtgaagctattcagcgtaacgtcttccatgtgcaggttctgcacggcacggatcacatcgctcagcttgcctacgccggacggctcgatcaaaatgcggtccgggtggtaggtctccagcacctgacgcagtgccttgccgaagtcgcccacaaggctgcagcagatgcagccctggctcatttcggtgatttcaatgccggcgtcctgcaaaaagccgccgtcaatggcaatcttgccgaactcgttttcgatgaggacgagcttttcgcccttaaaagcttcggagatcagcttgcggatcagcgtggttttgcctgcgccgaggaagccggaaaaaatatcgattttcgtcatattctcatgccctttcgcaataatttacggtttggataaacgctcttggaggggccgcgcaattcgctttctgcggaaagcgaccaaaggcgctgtccttgggatccgccgcctttgaaaaggcgggcgaaactttattcgctcggttgtctttcgcttatcacagaatggaagtttactgaaactttcggtctctccaatcttgtattgtaaatctttcttttaaaagttgcaagagaaatcgataaatgtttacactttcatcattttcatgcgctttcgcgccgtttctatccttcgcttaggtcaaaatcctcgcttaaaagcgccgcaagctccgcttccgtcagccttgtcacgtctccgcccgtcaatctgcgagactggtttaagattgcgtcctcgaccaaattgcgcaccaagcgtccgttgcccgccgttctggcgtccgttgcctgccgcttttcgtaatattgaagcagcggcgtttcgcatgtttcatcgatcgtatagccctttttctttgcggtcagctttgtaatggccagcagctcctccgccgtataattcggaaactcgatgatattcgggaatctcgagcgcaggccggagttcgccgtgagaaactcctccatttcttttgtatagcccgccaaaataacgataaggtcttctctgtggtcctccatccccttgacgatggtatcgatggcttccagtccgaaactgtcgtctgcgccgcggtacagcgaatatgcctcatcgatgaacagcacgccgccgagcgcagagcgaatgacctgctgcgtgagcggtgcggtgtgaccgacgtatttgcctacaaggtcggcgcgcgtgacttcaatcagctgcccgccgctcagtacgcccatggcttttaaatagcgtgaaacgagccttgcaatggtcgttttgcccgtgccgggattgccggtaaagatcatgtgcatggtgggcacatcggccttcatgccgcgcgcttcgcgcagccgctgaatgatatagttctgctcaagcgacagcacgtagtccttcacttcactaagtccgatgatctcgttaagctccgatttcacttcctcggcggctttcgggtctgccgcatgctttttctcttcttccaccgtgacggcaaaatccgggaatgtgaacgcgagcacaccgtcttttacgccgagtgtgccggaaacggtcttttcaccgtccttttccgcgcggcgcagcttttcttcgctcaaaaggcggaagcaacgttccgtcagccgcgccatgctctccacgccgtcgcggcgactgaatttatccgccaaaaacgccgaggcatcctcaccgaacgtgaacgcgtagtttagcttagcctttgtgcggtcgtttaatgcaccgagcgccgcttcgccgatcctgagcaggctctcgcgcgtgaattccgccgtgcggcagaaatccgtgacggaggacaaaaatgccgcgccgaacgcatcggtgaacgcgctgtccttttggctcgtcaaaaagacgaggtacttcccgtttacggaaatttcgctgacggcatcgggcacaagcgccgtgccgacatcgatgagcatgcctttctgcaaagcataacgcgaagctaattttaaaacgcccgtctcgcacagcgccgccaccatgggcagcaaagatttgtggcactgctcaaaattttcaaacagcacaatatcgttttcgctgtgcagcgcggaaaaaagatcctgtgtgagtaatttaccgtcttcggcgttcgggtagcgggaaaggtcgatgttcgtgacctcgccgtttttcaaaacgccctctttgcagagcgccgcagccgaagccgcaagcgcactgtgcctgcctgtgccctctttgccggagatcacgacgaccgctgcgggcttgccgttttcgcgccccgtcacgctcgggcggcgaaatgcggtgaacaggctgtccaaaaatgcgtcctgcccaatgaccgttctgcccgtcgcttccctcgcctcgcggaacgactgcgcggggtcctgcggcggctcctccgcgccctttgccttcggctttttttctgcggtctccgctttcggcgcttccatttcgggcgtgccggtcaggccctcggcgtccagcagacggcgcatttcgtccatgctgcgctgcgcgtcgctcgtcagcttatcgaggtcgctgatctgccgattcaggctgctctgcatgttggcattcgttttttcgatgctgttcaaaaaatcctcggcgtcttttgcggcgcggcttttcgtgccgctgcccacattcagcttgccgccggaaaacagtgcgtccaaaatgctgtcaatatcgtttttcacctaaaatcccctttctccgggtaaagctcaccgcgcttcgattgctgcaacgacgttttgcaccaaagcgctgtccgtcactttatattcgttctccgggatacccacgccgttcaatttaccgccgaaaaagatctccgggttgccacagacgcttgtgtcgtgccgcagggagcgcgccgaggcgtgtacactgtgcgtgccggtctcgttgataaattccccgacattctgcgtgttgatgccgccgccgggcagaatatcgatgcggtcacttgcgtattcgatcatctttttcacagtctttgcgccctttatcgcgctttcacgctggccgctcgtcaaaacgcgcgttacaccgagggcaataagatcatcgagcgctttagatacgtccggcaccacgtcaatggcgcggtggaacacaatctcggcgttcgggttgattttcttgattttcccgataaaatcggcgcaacggtcggtgtcaaccgtgccgtccggcttcaaaaagccgaagacgatgccgtccgcgcctgcatttaacagtgcttccatatcgcggcagcaagtcatgtaatcgaaatccgtgtagcaaaagccgccctcgcgcgggcgcaccatgcacatcacgggaattttcagtgtatttttcacggcctgcaccgtgccgatgctcggcgtaaggccgcccaaaaacagcgcggagttgagttcaatgcggtctgcgccgcctttttcggcctgtacggcgtcttcaaagcaaccgcagcaaacctcaaacaatactttttctttcatatttataccaactttcgtttatttgtcctatctgcggcgctttaaaacacaccgctttttgcactttcgactattctcacacaaatgcctttacaatcctctaaaaaagattataatagctttgaacgtaaaaagaaagataaatcgttaaattctaaagacaggggacgagattatgtcagataccgttcgtttaacagaagaattccgcggcgggcttttggacctgacgcattacggctacatcagcattgtagatgaaaagggtaaggtcatctactccgcaggcgacccggaggccatggttttctaccgctccgcttcgaagcccgtacaggcgctgcccgttatcgcgcatcacctcgacgaaaaatacggttttaccgatgaagaaaccgtgctgttcgcaggctcgcacctcggtgaaagcttccacatcaacgctttgaaatccatcatgaaaaaagccgacttaaatccggaagacctcattatgaagccgaccgtgccgggctctacggaagcaaacgaagagcgcatccgtcagggtctgccgaagtcgaagctctaccacaactgcagcggcaagcacgcggcgctcatgctcacccagcgtgaaatgggcggcgatgtgaaggattactggaaggtcggctccgtcggacagaacgaagtgctgcgcaccatgagcgtgctctccgagtacccggaagaaaaggtcgtcatcggcattgacggctgcggcgtgccggtgttcgcttacccgatgaagaacatcgcgacggcatataagaacctcgcgtgcatcgatacgattcaggacgacgttctgcaggacgctgcccaccgctttatcccgcgtatccatgaatatccgcacatgatgcgcggcacgggctacttgtgctccctcatcaaccacgacgcgaacatcatcgcaaagggcggcgcgaacagcgtgtacggcatcggccttaaaaaggagcgcatcggcatctccttcaagattaaggacggcaccgaggcggtctggccgctcatcatccgcgagatcttccgccagatcggctactataacgccgataccgataagatgctcgtctcgcttaacaacggcgttaccgttaacgacaacgacacgcccgtcggcgaagtgaagaccgtattcacgcttgaaaagcacttctaaaccttaattttcattcagcattttagataaagtctctgcatcgatttgtcccggtgcggaggcttttccttttgacgcaaacgtcatcacagagccgaacgccccgccgcgcacgcgcgtcaccttgccgagctcgcccatggaaatgccgatgagcggcccgcagaacgcagtggattcattcatcgccgccagcatcaccatcacatcgcgctcattctgcggcatcacggcgattttcggcaggtcggcatttaacgccatcatgcgcttatagcggtcggcgatttcctcgcgtgcaggcgttttggaaaaatcgtggttcgagatgataagctttgtacccatatcgtgcatggcctgaacggtctcctttgcaatgtcgtcgtactgctcgcaaaggaaaagctctaaatcgacaagcggcgcacccaaggcgctcagctgcgcgttcatcgcaaaatagtccatgggatctatcgctttttcgccgccctccgcttttgtgcggaatgtgcatagcacgggcaacggcgcggctgctttaagaatttccggcgctgccgcaaacatgtcctcatcaaaataatcgatgcgccattcgataagatccgccggggtggtcttgatctcttttacggcgtctaaaaccgcttccgttgtcttctcgcacaccggcacacaaattttcattctgccgctgccgaataccaaatcatttacaactacctgccgcatagctttcgctccctttttgtcaacttgtacacagtatagacaatttaagcacaaaagtcaaaacaaaaagtatttatatcttgtaacagacttctaaatctgctatgatgattttgtaaccgcgtgacccctttttcctacctataaagtgaaaggagttggccttatgacccgtttacaaaattctttattcgcttttcttttgtgcatcattctgcttttcaccgcgtgccaaagcgcaccggcatcctcgggcggtgcagataaaccgcaaagcatcgcatcggaaccgagcgctgccgagattgcaacgctcaccgcacgcctcgtcgatatttcgggcaaccagcttttactcgccggggaagacgacggcgtataccgctgcgcaaggccggaggacgcgccggatgacctcatccccggcatgacggtagacgtcacctacggcggctatatcaaagccatttacccaagcgaacccgatgacgtgcaaaagatcaccgtgcgcgaaggcgaaacggatgggcggtgcgcgctgtatttgtccgtgctgcaggaattattcaacacggacgaagcgctgcaaagcgacaccgaatatgtctccgttgacctgaccgagacaccgttgacgaaaggcgagatacaggcgatcgcatggcggttcggcgagcttaccgagcgccgcccgctcacgttcacgtttaaggagctgcaagacgagggctacttaaaaacggacgagcttttgtgggaagacggttgcttattcaagatcacggagaaaaacgacgaaaacggcacactgacgtttgacgccgaaaaatggcgtgccggggacggtgcctcttactttttagactgcaccgcaaaacagaagaaagacggcacctatgccgattttgagatcggcgcatttgctgccgcataaagttatcatcaaagagggaatcaacatgttgaaaagtcaggaagttcgcaagcttgcgccggaaatggacccgctgcgcatgggcatgggctggaaagaggaggacctcacaaagccgcagattttaattgaaagcacctacgggcagagccaccccggctccgtgcaccttttaaatttggcgcagaaagcaagccggggcgcatacgaatcgggcggcaagggtgcgctttactttgcgaccgacatttgcgacggcatggcacaggggcacgatggcatcaattattccctgccctcgcgcgacatcatcgccgaccttgtggaaattcacgccaacgcgacaacgtttgacggcggcgttttcctcgcaagctgcgataaatctgtgcctgcgctgctcatggctatcggccgcatcaacattccggccgtgttcgtgacgggcggtgtgatggacgcgggtcccgaccttttaacgctggagcagatcggcaaatacagcgccatgtttgagcgcggcgagatcaccgaggagcagttcacgtattacaagcaccacgcgtgcccctcctgcggtgcatgctcgttcatgggtaccgcgtccaccatgcagattatggcggaatcgctcggcctcatgctgcccggcacggcgctgatgcccgccacttgcgaagatctttccgttgcagcggaggaagccggcaaaaccgccgtggcactcgcgaaaaagggcatgaaagcgtccgacatcgtcacgctgaaatcatttgaaaacgccatcatggtgcacgcggcaatctccggctccacaaacacgctgatgcacctgcccgccatcgcgcatgagttcggcattccgctcgacgcggatacgttcgaccgcatgcaccgcggcgcgcattatcttttgaatatccgtcccgcaggcgagtggcccgcgcagtacttctattatgcaggcggcgtaccgcgcatcatggaggaaatcaaagaccacctgcatctcgatgtaatgaccgtcacgggtaaaacgctcggcgaaaatctggaggatttaaagaaaaacgacttctacgagaagtgtgatacctatttaaagaaaaccggtctcaagcgcacggatatcatccgctcgttcgatgatcccatcggcacgaacggcgccattgccattctgcgcggcaacatcgccccggacggcgcggtcgtaaaacacagtgccgtgccgaaggagatgcacaaggcgcttctgaaggctcgcccgttcaactgcgaggaagatgccatccacgccattttaacgcaccaaattcagccgggcgacgccgtcatcatccgctatgaaggcccgcgcggcagcggtatgccggaaatgttctacaccaccgaagccatttcgagcgacccggagctttctgccagcattgcgctgctgacggacggtcgcttctccggcgcaagcaagggtcccgccatcggccatatttcgccggaagccgcacagggcggccccatcgctttaatcgaagaaaacgaccttatcgagatcgacattccgcagcgtattctgcgcgtcatcggtatcaacggcgaaaaatgcagcgaggaagaagtgcagcgcgtgtttaacgagcgccgcaaagcgctgccaccgtttaagagccgctacacgcacggcgttttaaagcgcttcacgcaaacggcacactcccccatgcaaggcggttacatggactaaaccgaatcctaaaagcctgcgttatgcaaccctcatttcgggcccctgcacaacgcaggcttttctttttcaaaattcaccatgtatatgcgtataaatatacattagtttgtgcattattccgcttgatttttgaatgaaatcggcgtaaaatacattcatcttcaaaattatacaagccaaagcttaaaggtatattgcggaagggtgaatgtaaaatgaaaattcaaaaggtttgcgcttcatttttaattggcgctatgatgctctcacttgcggcatgttcgggcagtacgaagaagattgaaagcccggcggactttgagggcgcgaaaatttccgtgcagacggcgacctccgcgcacgaaagcattcaggatatgcaggacgagggcatgaacatcaacgtgctgccgtacgaaaaggtgacgcagtgctttgacgacctcgcactcggccgcgtggatgccgtgtacgtggacagcgtcgttgcgggttactacctcgcggaggacgacacgaaataccagaaaacatggacgagcgaaaccggcgagccaattggcgtatgtcttaaaaagggcaacgacgatttgaaagagctcatcgaaggtgcgattgataccttatattatgacggcaccatggcgcagctttccgaaaagcacttcggctccgccgccgatgtggacggtgtgcgcaatgtgacggaaaagccggtgcttgacctttctaagcttaaaacacttaaggacggcaccttaaccgtcggcgtggaagtcggctacccgccgatggagtacaccgatgacgcagggcttgaatatcagggcttcgatatcgactttgcaaaagcgctcggcgaggtgctgggcgtagacatcgagtttgtcaacactgcgtgggacggcatttttgcgggccttgataaagagcagtacgacgtcattatctcgtccgtgtccattacgccggaacgtcaggccgcgtatgaccttacggaaccgtatgtctcgaatcagcttgtcattgtcacgttgaagtaaaaacgccgattttacccacaaatcttgaaaaatacctgtgtatatatgtataaatatacattaatttggcagtttcgctattgacccaaacgggttttgggggtagaatacaagtattctaatcgattggtacagtgaaacgactgtatctctattatcggggaaaattgagaaagaaggacaaaacacatgaaaatgaagaaaatccttgctgccgtgctcgccggcgtaatggcactctccgccaccgcatgcagcagctccagtacaaagaagattgaaagcccggacgatttcgccggcgccaaagtcagcgtgcagaccggcaccaccgcccacgacgctctgcagaaaatgcaggaagagggcgttgacgtcgagattctcccgtatgaaaagattacgcagtgctttgatgacgtttcgctcggccgtgcagatgccgtgtacgtagacagcgttgtcgcggcgtattacctcgcagacgacgactctaaattccagagcgtttggaaaagcgacgaaggcgaaccgatgggcgtctgcatcaagaaaggcaacacagaccttttggagcagaccgaaaacgccatcaacacgctttattataacggcaaaatctccgagctcgccatgaagcatttcggcaccgatgtcaccgagggcgtgcgcaacgtcaccgaggaaccgaccgttgacccgagcaaggtcaagaccgttaaggacggcgttttgactattggctttgaggccggttatccgccgcttgagtacaccgacgacagcggccttgtgtatcagggctttgatgttgatatggcagaagagattggtaagctgttcggccttgaggtcgagtttgtcaacacctccttcgacggcgttttcgcaggcctcgataagggccagtacgatatgatcatcgccggcgtttccatcaccccggagcgtcaggaagcgtatgaaatgaccgagccgtacctctccaaccagctcgtcatcgtcacaaagaaggacgcataagcgcaataacgtaaaatgaaaattcggcaggaggccccgttttgaggtctcttgccccatttatatcggaaaggatatcaccatgaacgccattcaacaaatcatcggctggatgccggcgctgctccaggccaccggcgtaacgcttgcgctttccgtcacctccgtgctgacggcactcgtgctcgccgtgtttcttgccctcggcaagatctccaaaaacaccgtactccgctccgtgtgcggtgcgtacatcttcttcttccgcggcacgccgcttctgatgcagctgtttttcctctattacacgctgccgcagctcgttccggcgttcaatattcagagccgctttttggccgcttggatcgcgttctcgctgaacgtcgcggcctacctcgcggagatcatccgcgcagctattcagtccatcgataaaggccagcttgaagcctccacggcgctcggtctcacccactcgcaggcgatgcgccttgtcatcatcccgcaggcctaccgccgcatgattccgccgatctgcaacgagttcgtcatggtgctgaaggatacctctcttgtgtccatcatcgcgctgaccgatttgacctaccagacgaagattatcgcttccaacaaggcgagcgctctcgtttatatcccggctatgatcatctacctcatcatcaccggcgtgttcaccgttattttcaatcgccttgaaaagcgcctgtccatctacgaataaggaggaatacggctatgtctatcattaaaacggaaaatatctgtaagtccttcggctccgtagatgtgctgaaaaacgtcagcctcaccgtagagccgggcgaagtggtcgtcatcatcggaccgtccggcgccggcaagtcgacgtatctgcgctctttaaaccaccttgaaaagcctacgagcggcaagatctggatcgacgacaagctcatcgaagaccgcgtgaacggccacaatcaggtaaagctgccgcataaagagcgcgccgctattttgcttgagatgggtatggtgtttcagcgcttcaacctcttcccgcacaaaacggcactgcaaaacgtcatgctcgccccgatgaacgtgaagggcgtgccggaaaaggaagccaaagaaaaggccgtgaagcttttaaatcaggtcggcctcggcgataagctcgattcctaccccgcaaagctttccggcggccagcagcagcgtgtggccatcgcccgtgcgctcgccatggaaccgaaaatgatgctgttcgatgagcccaccagcgcccttgacccggagcttgtcggcgacgttctgaacgtcatgaaggagcttgcggaagaaggcatgacgatgcttgttgtcacgcacgaaatgggctttgcccgcgaagtggcagaccgcgtggtgttcatgtatgatggcgcgattttggaggaaggctccccgaaggagatcttcacaaatccgaagcacgaccgcacgcgccagttcctgcaaagcgttctgtaaggcgatagcatgtttgaaaatacctcaaaatgcgaagactgcctgtattacgagtacgacgatgagtacggcttctatgtctgcgatatggacttagacgaggatgagaccgcccagttcatcggcggccgctttcaaaactgcccgtactaccgccccggcgacgaatacaccatcgtccgcaagcaaatataataacattgtatgacaaaagctctcccgaattcgtttcgggagagcttttctacatataactatagatcggttgtttacttttcaaatcacttgtgataacatgagaaaaaacaaaggagaatgaaaatggagctatatattttgattggactcattacaattgttcttattttgcagattgtctttcttctcaagaagccaaaaagtgaaaatactgcaacaaatacgaattacgaaagcaattttcagcatattgaaacctatattgccgatgagttttcacgtagtcgaaaagaaacatccgaaagcttaaacagccgtttgagcgaaatgaacgccctgatacgcgaaattcagcaaatcaacacgcagcaaagcgaaaagctcagcacaaccttgacgaagaatatcgattcactactcgagagcaatgaaaagaagctcgaccaaatgcgtcaagccaatatggagcagaatgaaaaaataagcagcgccttaacacaaaacctaaaagctttgcaggaaagcactgagaaaaaacttgagcaaatgcgcgaggtcagcgcacggcaaaatgaacatatcaatgaaacgcttacaaaaagcttaactgctctacaagaaaacaacgaaaagaagcttgaacagatgcgcatgaccgtcgatgaaaagttgacagatacgctttccaaacgtctggacagcagctttaaagtcgtcggcgagcagcttaaaagtgtttacgagtcactcggcgaaatgcgtaagatcaccggcgatgtgacagcgctccagcgcgtgctgacaaatgtaaaagcgcgcggaacatgggcagaggtgcaactcggcaatatactggagcaaacactcaccaaagaccagtacgactgcaacgtatctacgaaaaatgatacaaagcgcgtcgagttcgccgttaagatcccctcccgtgaaaaagacggcgagaccgtatggctccccatcgactccaagttcccgcaggaagactacatacgcatttgcgaggctgccgaaaaagccgataaagaggctctggaagccgcgcaaaaggctctggagcagaacattaaaaatcaggcaaaaacgattgccgagctgtacatcaatgtcccaaaaacgacggattttgccattatgttccttgctaccgaggggctttactcagaggtgctgcgccgccccggcttgtgcgaggaaatccaaaacaagtatcgcatcatgatctgcggtccgaccacaatcaccgcgtttctcaacacgttgaatgtcggtttccgcactatcgcactaaacaaaaagacaacagaaattcaaaagacgctcagtgccgtaagctcacaatatgatttgtttgaatctctccttgctaaagcaaagaagaaaatcgatgaagccggttcaagtatcgaggctgcgcaaaagagaaatacgacaattcaaaggaaactgcataacgtagacaaaatggacgcagatgaagccgaagcactgttaaattccggcgagtgatttcaaatcaaatagaaagataccgcattcagcctacaaaccgaatgcggtatctttttatcaaatgctgtaatcgttgacgaaagtcgcctgctgctgatccaatatatcctgcagggtgatgctgtcgagatattcgttgatggcgcggctgagcccctgccacacaggcagcgtgatgcagtctgcactgcggtcgcacagaacggggtcgtgatcgagacacgcgacgggcgcgagactgccctccgtgatgcgcagaatcatgcccacagtgtatttatccggcgattgcgccagacgatatccaccctgaaaaccgcggcttgcaagaagaatatcggatttattgagcatcggcacgatctgctccagatattttttggagacattctgacggcgggcaatgtccttcagcgcgacgtagccgtcattctggtgctgtgcgagatccagcagcatgcgcagcgcatagcgccctttggtggaaattttcatgcggtatccatcctttatgtaaaatagcgtttccggaataaaacaagcgggctcactgtccgccgcaaactttataccataataacatgtttttagtaggttttcaagagttttatttttgccggtaatttactgtaaaaacgccctctataaactcctttaaactcgcgaaaaagggcaaagcccgaaaaccttgcccctttccctcattcatttttctatcccaaaaatatgtgtttggattcttgtatgctgtatcagtctgcaaacatcggcgtggagaggtaccgttcgccggtatcgggcagaagcgccacgatgaccttgcctgcgttttccgggcgctttgcaagctgtgctgccgcaaagactgccgcgccggaggaaatgcccaccaaaacgccctcgctgcgtgccagcgcgcggccggtcgcaaacgcgtcctcattctgcacggggagaatctcatcgtaaatgtcggtgttcagcgtatccggcacaaagcccgcgccgatgccctgaattttatgtgggcccgccttgccgccggagaggacaggggaggtagccggttccaccgcgacaaccttaacattggggttctgcgacttgaggtacgcgcctacaccggagagcgtgccgcccgtgccgacgcctgtaacgaaaatatcgaccttgccgtccgtgtctgcccagatttccgggccggtcgtcttcaggtgcaccgccgggtttgccgggttcgtgaactggctcggaatgtagctgtttggggtctgctcggcgagctccttcgcctttgcgatagcgcccggcataccctttgcgccttcggtgaggacaagctccgcaccgtaagccttcaaaaggttgcggcgctccacactcatcgtctccggcatggtaaggattaccttataaccgcgggaagccgcaacggaagcaaggccgatgcccgtgttgccgcttgtcggttcaatgataactgcgccgggcttcaagaggcccttttcctcggcgtcgtccaacatcgctttcgcgatacggtcctttacgctgcctgccgggttgaaatactcaagcttcgcgtagattttcgcgttcaattcatttgctttttcgtagttggtgagttcaagaagcggagtgccgccgatgaggtctgtgattttgcgatatacacgcatggtaaagtctccttaaaatactttatataaatgagtttgcattcttgtatcgtttcaggctgcggcgcaacatcgccgactgtacggaaacgggttcatatcgcgtctctcctttgccttgttttgctaagcttattaaacctacttattttataggttatttaacttgcttatatcctatcaccacagggtaaatttgtcaacatcttttttcacttttccttttacctttaaaactcgttgaaacgatccgccgatttgcaatgcaaaatgcagtttcccccatataatagtagggtttccgaaaattttcttcaatttttgcattttaggggttgacaaattgcaatccagcgtgtatcatacaaaacataccaagtcaatatgttttgagtgttatgaaatcttcaaacataaaaattgaagtaaatctcaaaggaggcgcaccccgatgatgcgatcccttttccggcaaatgcttcgccacaatttcagaaacggacgaatgtgaagctcagcttttcgtcaacttctcaaaatccgttaaaacaagaattaaattctgaaattatgaaagaggtattaccatgagctatacatatgataacaactaccattttgaaaccatccagctgcacgcaggtcaggagaacccggaccccgctaccgatgcccgcgcagtgccgatctatcagacgacttccttcgtcttcaagaactctgcacacgcagcagcccgcttcgcgctcgcagatgtaggcaacatctacggccgtctgacgaactccaccgtggacgcatttgagcagcgcattgcagcccttgagggcggcgtggcggcgcttggcgtcgcttccggtgcagcagccatcaactatacgtttctcaacctcgcaagcgcaggtgacaacatcgtttccgcgaagaccatctacggcggcacctacaatctgcttgagcacacgctcccgcagtacggcatcaccgcaacgttcgtagacccggacgaagaaggcgcttttgaaaacgcgattaacgataagacaaaagctgtcttcatcgagaccatcggcaacccgaacgcaacgctgattgacattgaaaaggtcgcagccattgcacatgcacataagattccgcttgttgtagactctacattcgcaacgccttacctcctccgtccgttcgagtacggcgcagacattgttgtccattccgctacaaagttcatcggcggtcacggcacggcgatcggcggcgttatcgtagacagcggtaagtttgactgggagggcagcggcaagttcccgtccctcgtagagccgaaccccagctaccacggcatcagcttcacaaaggacgtcggcgcggcagcctttgtcacgaagatccgtgcaatcctcctgcgtgataccggcgcaacgctcgctccgctgcacgcattcctgttcctgcagggtcttgaaacgctctctctgcgcgttgaacgccatgttgagaacgcgctgaaggttgtcgatttcctctccaaacacccgaaggtcgaaagtgtcaaccatccgtctctgccggacagcccgtaccacgagctttataagaagtatttcccgaacggcggcgcttccatcttcacgttcaacatcaagggcggcgctaaggaagcacaggcgttcatcgatagactcaaaattttctctttgctcgcaaacgtcgcagacgtgaagtccctcgttatccacccggcttccaccacgcactcgcagctcaacgaagaagagctcgcagagcagggcatccagccgaacaccattcgcctctccatcggcaccgagcacatcgatgacatcatcgccgatctttcccaggctttcggtgactgattcaaaacactccttaaaactgacttctccgatatcctattttccgtgtccccacgtcagaaatggcgtggggacatgctttttcccgaaatccggcggctttgcatcttgacatcccgccctatctgtgttagaattttaaggctaataaagttagcttataaagtaacaattcggaggcgaaatgatatgaaacacattcagacgcttgagacccgcaacctgtgcgaaagcgcaaagaacggcggctgcggcgagtgccagacttcctgccagtccgcttgcaagacgagctgcggcattgcaaaccagcagtgcgagaacacggagaagaacgcgaagtaattcaaaggttcagaaaacgccgccttttttggcggcttttttcatgtatagatgcgaaaggattttttagatgatacaccgttataaactcggcggcatgaacatcgtgctcgatatctgttccggctccgtccaccttgtcgatgaagttgcctatgacatgattggcctgttcgagaccgaaagccgcgaggcgattaccgccgctatgctggaaaaatacggcgaccgtgaggacgtgaccgaagccgacatcaacgaatgctacgagcagattgaagagctgcgcgatgccggtaagctcttcacccccgatacgttcgagccgatggcaggtgcgctgaaagcgaaaagcgccaacgtcgtcaaggcgctgtgcctgcacgtggcgcacacctgcaatttaaactgctcctactgctttgcaagccagggcaagtaccacggcgaccgcgctctcatgtcctttgaggtcggcaagcaggcgcttgatttcctgctcgaacactccggcacgcgccacaatttggaagtcgacttctttggcggcgaaccgctgatgaatttcgacgtcgtaaagcagcttgtcgcgtatgcccgttcccgcgaaaaggaatgcggtaagcacttccgcttcacgttgacgacaaacggcgttttgatcgacgacgacgtcatcgattttgcaaatcgcgagatgagcaatgtcgttttaagcctcgacggccgcaaggaagtgcacgaccgctaccgcgtagactacgccggcaacggcagttgggatcgcatcgttccgaaattccagaagctcgtcaaggcgcgcggcaacaaggcgtattacatgcgcggcacattcacgcacgcaaacccggattttctcaaagacattcagcagatgctcgacctcggctttacggaactgagcatggaaccggtcgtctgcgcaccgggagacccctccgcgctgaccgacgaagaccgcgtcatcgtcatggagcagtacgaaaagcttgctgagcttatgctggagcgccgccgcgccggcaaaccgttcacgttctaccactacatgatcgatctcaccggcggcccgtgcatttacaagcgcatttcgggctgcggctccggaacagagtacatggccgtcaccccgtggggcgacctctacccctgccaccagttcgtcggcgacgaaaaattccgcctcggcgatgtttggacaggcgtgacgaacacggaaattcaggcggatttcgcctcctgcaacgtgtacgctcaccccgagtgccgcgattgctgggcaagactgtactgctccggcggctgcgccgcaaacgcctaccacgccaccggctccgtccgcggtgtttacaaagagggctgcgagctctttaaaaaacgcatggaatgcgccatcatgctcgaagcctccaaggcattggataacaacgcatgataaccgcgccaatctgcgaatttgtgcgccgctaccgatatagcggcgctttgcgcatgcacatgccgggccacaagggcaccgcgctgctcggccccgagccgctcgacctcaccgagattgagggtgcagacgtgctctaccacgccgagggcatcatccgcgaaagcgaagcgaacgccgccgcgttattcggcaccaaaaagacggtctactccgccgagggctcgtccctgtgcatccgcgccatgctgtatcttgcgctgctgcatgcccgcgcaaatcacaaaaagcccgtcattgcggcaggccgcaacgcacacaaggtcttcatgacggccgcagcgctgctcgaccttgacattcgctggatctacggcacggaaagcgtcatttcctgcgccatcacccccgcgcagctcgaagacgtgatcgtatcggaaaaccctgccgccgtgtacatcacaagcccggattatctcggtaacatcgcggacatcaagtccctgtccaccgtctgcaaaaagcacggcgtattattgctcgtcgataacgcccacggcgcgtacctgcattttctgcccgagcccatgcaccccatgcagctcggcgcagacatctgctgtgattccgcacacaaaacactgccggtcttaacgggcggcgcgtatctgcacatcgcgcacggcacaccggacatgttcgcgcagcgtgcggaaagcgccatggcgctctttgcgtccacgagcccgtcctatctcattttgcagtcgctcgacgcaatgaatccgcttttagcaacatcttttcccgcacagctcaaagcctgtgcggagcgtcttgacacgctgaaagcaaagctccgtgcgcacggctatgctctttgcggcgaggagcgcacaaagctctgcctactgccgaagtccttcggctacacgggcacagctctggcggaaattttgacgcacagcaatatttactgcgagttttccgacgcagaccaccttgtgatgatgttcacgccggagaccacacccgcagatttcgcccgtctcgagcgcgcgctgctctccgttctgcccgccccggcgatcctttcaaagccgcctgtgccgccgcatgccgagcgtgtactttccccgcgcgaggcgctcttctcgccgagtgaaacgctgccgctttccgagtgcgaaaaccgcattttggcagacgccaacgtgagctgcccacccgcggtgccgcttgctgtatgcggtgagcgcctgacccctgaggtcatctccgcgatggaatactacggcaccgagcactgcacggtcgttgtggaataatcactattttaaaatataaaagtctccgttttcctctttgattcagagaaagacggagactttttgcttctattttatcttatttgaatttctaaagacagtcgcagaccgccttttagggaacccatgcaactgtgttccctacgcttgaagcgtccaccggatgtttcaagctgccttcctcgttttgggttaggcaaaaggtgtttcgtcgtttgcgaacgacgacttagggtgttgccccaagaccccaccaactttctcgaagaaagttggacaaagactttgttcgtcgctccgctatcgttgtcgtaaacgcgtcaaatcttaattttcagccatttgccctgcttcattctgaaatacccaaggcagaatcgcataaattggtcaccgaacagcccaagccacacgccaagcagtcccagtcccagcgggtagcacagcagccagcttaagcccggtcggataatggcgacgctgatcatagacgcaaacgcggtatacttcgtatcgcccgcgcccctcaggcaaccgaagaaaataacctgcgtgatctggagataaatgataacgcacagcatgcgcataatcatcacacccatatcgagaatttcctgctcactcgaaaacaggccatagagattcctgccgaagaacaggaaaaccatcgacatcacaaacgcgcagaaaagtccgattcgctgacacatggaggcgtacagctttgcaagatcgcgccgttcttcgccgagactcctgccgatcagcgccacagacgccaccgaaagcccatcaccgagtgagaacgtcaaactcatcatattcatgccaatctggtgcgcagcatacgcagtggtgccgaggttcgcaacggtgatggcgaacagcaaaaagccgatgcgtaggaaaatctgctccacaaacgcgctggaaccgacgttaagcagggagcgcacgtcaaacttcgaggtaaaaaagcctttcacgccgcggatatatacaaacgaggacttcgcgaacatggaatgcaagctcatcgcgcagccgagcacagagccgatgacggtcgcaagcgccgcgccgcgcgtgccgagcgccggaaacccgaagttgccgccgatcaaaagatagttgaacaccacgttcacaaggttagagaccatgttcgtgcgcagcgcgatctttgtgttgcccgcgccgcgctgtgccgcgttcacgatcatcatcacggtcgtaaatccgatgccgcccatgatgatttggaaatactccaccgccgcttcatgcgtatcgtccgccgagcccgcaaagcggataatggggtctgcaaacgccgtaaacgtaacactgatgatcgccgtcaaaatcacggcgaccagaatgcacgttttcaaaatgcgcaccgcgctttcgcggttctgctcgcccctacgccgtgcaaccagcgccgagatggccgtgctcatcgacataaacagcgccaagccgatgaacttcggctgctgcgtcaggcccaccgctgcaatggcgtaagaacccagcgtgctcaccatgatggtatcgataaagccgacgagcgccaccaaaaacgattccaccatcgaaggccacgccatgttgatggtcgttttgaaaagcgagttcgtagacggcagctcgcccgtcacaggttcgccgtgcaaaacatgctgtgcgttaaagagttccaaaagtattcacccattcccaaaatagttgcttttgaaacattatagcattaaaaaagaagccggtcaagacacgtaccgtttatttgtacgcagttcgaccggcttttcaactgttatttgtttattttgtggcaagaagcactgccgtgttggatttcgcccagcacacgcgtacctctgcaaagcccgctttgaaaagcagtgccgcttcgcccgccacatactgcggtgtaaagcaatagtaatgctcgtctgccgacaaatgctgctccttgcgcttctgctcaaactcggaacggcagaagtcctcatacatctgcgtcggcgcgaatttgtcgctcaacagaaagaacccgccctttttaatgctgcggcacacgcggtgaaacagctccaaattctcttcgcggctgtaataatgcagcgccatcatggaaaccgcaccgtcatagctttccggctccaactcatatttaaagaaatcaccacaaatcgtgcggatgcgctccttgtgctccggcagatttttcggaatttccgagagcatcttatccgcgcagtcaatgccgtccacataaatcgtcgggttctgctctaaaattgccgtaagacccgtgcctgtgccgatgccaatgtccagaatgtgcaggtgctccttcttcgggaaaaactccgccgtgcggcgaatgtagccgtcttcatcctctgcgctgcgtttcaagcgctcgtcataagactccaccgcgccgttaaaataactgtcgatcctttccagtggcatatgcacaccaatcctttcctgccgacgcaatactctaaacgatagttttgcgtcaggcgcataagctatgcaaaacttttgcgatatttttcatttacccattattactattttactggaaattcgctcaccttgcaacttggaaaaacgacaattctgcgcgggcttcggcaaaagatattggactaatccatgaatatcccgctgaataccgcggtttacgcgaagatcatgcgaccaaaatcctgcggacgatggaaatccggcgtttcgctcgtcgtctcattccacatcatatagtgcggctgcacggtgaggtcgccgcatttaaagcagttcgcgcggatcacacgcccgcttttaaagtcgtaatcggggtaaaatacatgcagaaattcgagcggaatttcataaaagatttcccacccgtccgccgttttgttcgtgcggatgttaaaaagcttcttgtggtcttccgggatcaaacggatgctgtctgctctgccgtggccgaagccaaggaaaatcgcgccgttcaagttcagctcaatgttaaaataccgcccgtcctccggcaccggggaaaagaaaaactccatgcagctgtccgtgcagatgctgccgagcttatcggtcagctccgcgcggatgttcttttcgtgtgccacctgatgcacgtagattttcttgtcgtcgtagcagatctgctgctccatgcgcacgcccgcgtccggcaaccaacaaacattgtccacctgcagctccgacacctttgtccagtccggcgcacccaccgttttctcaatgacatactctttcatattcatacagctcctaaccgttttccgcccatcgcggtttttcatggctttattataccagattttgccgcaaaacacaatcattccataaaaacaggcgctcccgaaaaacggaagcgcctgcgaaaaagctattctaattagacctcgtgcgggtactttctcatgtaggaaagcagctcgtcaacggtggtgaaggccatgccggtgacggtgtcggcagcaccatagtagatggtgatgcggccggtgtcggcatcggtcagggtagcgcacgggaacgtaacgttcggcacgtcaccggtgagctcatagctctcttccggaccgaagacatagaagttgcctctttccttcacgatccacggcttctcgtggtcaagaagcgctacgccgaagcgataaacgaagccgttgcaggagttcagaacgccgtgataaatcatcagccagccttcatcggtctcgatcggaatcgggccggggccgaccttcttggactgccagccggagtgactgctcgtgccgaagacatagcggtgcttgccccaatacgtcatgtccgggctctcgctgtagaagatgtcgccgaacggggtgtgaccggtgtcggacggacggctcagcattgcaaagttgccgttgatcttcttcgggaacataacgccgttgcggttatacggcaggtaagcgttctccatctgatagaaggtcttgaagtcataggtatagcctacgccgatcgtcgggccgtggaagccgttgcaccaggtgatgtagtaacggtcctcaatccagcaaacgcgcgggtcatagcgatattccttgcgggttacgcacgggtcgcagccgggagccggctggaactcgatcggctcgtggttgatcttccagttgatgccgtcatcagagaagcctgcgaagatgtccatctcaacagagcggttgtcgcagcggaaaacgccagcgaacttgccctcaaacgggacaactgcggagttgaagatgctgttggaagtggggatgagatcacgcggaatgatcgggttgtggtcataacgccaaaccggcttatcgtagccctgcggcttatcctgccacgggatgttcgggagtgcattgccgataattttagccattgtagtttcctccattttatattttttcaaaagacattcgaaagcgaacacatacagtcctttacaatgtgtaaccgcttccatatcacattaactataatacaaaccaagagaaaagtaaagctattttttccgaaaaaaccgtttctatcacaattccaccaaatttcatcgccgcctttagcaaaatgccgaagcccacgccgtacaccgcatcacaaaccgccaactttatgcaacaaatgcctattgcgcaaaagccgcataaacgatatactgttgttataaacggatatttctctgcccgaatttttatgttttcccgaaaggaacgattttatggcgattttatttgatgccgaaaagaaaattttcaagctggataccgcttcctccagttacgtttttgccgtgcatgacagcggccgcctgctgcacctctactacggcgcatacctgccggactgcgacatgcgctatttattggaccgcggctacttcggctccttcacgcccgacgccgcaggctacgtcggcaaggagttttccccggatacacagccgagcgaatattcctgcaacggcaccggcgatttccgcatctccgcactccaaatccgcaacgcagacggcaatatcgcgaccgacatccgctacgtttcgcaccgcattttaaacgaaaagcctgcgctgcccggcatgccgtctctgcgcgacgaaaacggtgacagcgaaacactcgagatcaccacgctcgaccaaacgacgaacgccgaagtgaagctctactacaccgtttacaacgatctgcccgtcatgacgcgtcacgccgtcgtgacgaatacgtccgaccgcaccatggagcttgagcgtgtgttcagcgcctgcctcgacttcaacacgatggattacgacatggtgcacctttacggcaagtgggcaaaggagcgcaccgttacagagcgcccgctctgccacggcattcaatccatccagagcaagcgcggctcctcctcacacaaccacaacccgttcgtcgcactgaaagcccacggcgccaccgaagaaaacggcgaagtctacggcgtcaacctcatttacagcggcaacttttccattgaagccgaagtggattgcttgaacgccacgcgccttctcgcaggcatcaatcccaccgatttcacctggcgcctggagccgaacgaatccttcaccgcgccggaagccgtcatggtctacaccgataggggcctcggagagatgagccgcattttccaccgcacctacatgaagcacctcatcaagagtccgtggcgcgatgtagaacgccccgtgctcatcaacagctgggaggccgcatacttcgatttcgatgataataagcttgtcgcgttcgcacacgaagccgccaaaatgggtgtcgatatgcttgtcatggacgacggttggttcggccaccgcaaaaacgacgactcctccctcggcgactggtatgtcaacgaaaagaagctcaaaggcggcctcagctccctcatcgagcgcgtcaacgcagagggcttaaagttcggcatctggtatgagccggagatgatctctccggacagcgacctctaccgcgcccacccggattggtgcctgcacgtgccgaaccgtgaaaactcccccgcacgcttgcagtacgtcctcgatatgacgagaaaagacgtgcgcgataatatcttcgcgcagatgtataaagtcctcagtgaaaataagattgattacgtcaaatgggacttcaaccgcaatctgaccgaggtcggctctgcgctgctcccgccggagcgccagaaggaggtcatgcaccgctttgtgctcggtacatacgacctcatggatcgttttgtcaaagcgtttccgaatatcctctttgaaaactgctccggcggcggcggacgtttcgatgccggaatgctgtattattccccgcagatctggtgcagcgacaacaccgacgccatcgagcgcctcaccattcagttcggcacgtccatgtgctaccctatctcctcgtttggcgcacacgtcgcagcccgcccgcgcacctcgcttaaaacccgcggcaacgtcgccatgtgcggcacattcggctacgagttagaccccagaaagctcaccgatgacgaaaaagccgaagtaaagcagcagatcgccgactaccgcaaatatcactgccttgtccgcgagggcgatttctaccgcctcgtctccccgaccgagaacgacttctactgcgcgtgggagttcgtttcgccggataaacaggaagccatgatgactgccgtcgtcatgcgtcagcccgagacccgttactgcgtgcagcgcctgcgtggcctcgaccccaaaacgtactatcaggacgaggagaccggcaccgtctattccggcgccatgctgatgaacgcaggccttaatttgacaagagacgtctacgaagacggcaccagcgtcacaaagcactttaaagctgtaaagtaaagccgccgaaatccacaataccgcaacgttaaaagtctttgattaaactttcttcagaaagtttatgggggctcggggcaacgccccaagtcgcgctccgcagagcgcgaaacactttttgcctccacaaaaccagaaccgtaggaaacccagttgcatggattccctgcatgatttgccccgcaaatcattagaattaaatgaacaaagcaggaccccgtaaacacacaacgtgcctacggggttcctgctatataaatcataaaaaaatcgacttatttctcatccgcatgcgtgctgttcatcaggcggataagtgccttctgtgcgcgttcctcgcataccgcaataatctcatcgcccgcttgcagcaccgtgtcgccgcccggaatgatgagcttgttatttcgcacaatggaaatcagcagcgcccccttcgggaacaccacctcacgcaccgacttgccgtgcaaagccgaattctctccaagcgtcacggagcaaatctgaccgcggcccttgttcagcgatgccacaagatgaaactccatcaggttcgcttcctgctcgatcatctgcgcaatgatctccgtgctgctcaccgcataatccacgccaagcacacgcatcgtctccaaattgcgcgggtcgttcgcgcgggcaatcacttttttcgcaccgaaatactgctttgcaagctgcgacgcaacgaggttgtccgcatcgttgccggatatcgcaataaagcagtcggcgtcccgtacaccggcgttttccagcatgtcaatgttcgtgccgtcgccgcagataatctccacgtccagcgagttcgcaagctgtaagctgcgcgcgcggtcgctctcgatgatacgcacctcgtggcggcggccctccaaaatgcggcgcgcaaggctttcgcccaccttgccgccgcccataatgacaatgttcatggcacattcccccttaatcgattacgcggctgtacacaatctcgtcgcccgcctcgagcttcaagggtgcaagccctgccaaaacgaacgcgccgcttttgcggataatgccgaacaccacttcgtccgggttgccgcgtagctcgtccacatccttgccgatctgatgccgctccgccggccgcacgtcaaagtcaaccgtgtgcagaccgaactcgattttcttgctcaatttttcgccgctcagcatccgcacaatgcagtcgccggcgtggtttgtggggcaaatggtgtgcaatcccatatgctcaaaaatcaattcacgcgttggatcggatacgcgcgccaccacgttttggataccgaagtaatcgcgcgcaatctgcgccaccgtgatattgaagttatcgtccgccgttgtcaccgccaccgcgtcgcagctttcaatgcccgcttcgcgcaggttgcgaatatccatcgggaacccgcggaatgtcacgccctcgaaatcgttttccaaaagctccaaatcgctttcaatgttgcttaaaacagaaacgtcccaacccatttcgtccatggtgcgggcgatttttcgcccaagcaggccgcagcctataactaacacattcatagtttacctcagcgtcgctccggatcttccgtatcgcgaatggtctctgccgtcatgccgtttgatgtgctgccggaactcgtattctctcggttaccgccgtttacgataataggattattcgcattcggcgtcggctctgcagtgggggcgggtgtcggcgatgcctcgctgccgttttgcgcgtcatcgctgtccccattgtcatcggtcgtgccgtcttccgcattcggggtcggcgaaggcgtcgcggtcgcaagtgcggtcttctctttctcactgatcgtcacaaattccgcgaacacatacgcattctgcccaaagtaagagatttccacccactcggaggtatcgtcctgtgccacaacctcgaacgcctcgccggcctctgccgtgccgagaatttcggaatccgtcgaagcctcgctgcgcacattcaacgaatcgtcgatgtcgttgatgatcgccaccttcactttttcgaccggtataggcgttgcggtaggctccgcgctcggggagggggagggctccgccttggcgctgcccttgccgcatgccgcggtgccaaggattatcgcggcgcacagtgccgccgtgaccgccgttttcaaaatgtttttataatggatgcttcgtttcataaaagctcacttctcctttcttttttcggcgcgcattcaaaatgtcgccggaacataagatgatttgttattagctattttagcacagttcaaaggaaaatccaatacttcgcccggttttttcatttcttttgcaaaaatcacccgcatttcttgccattaccccgaaaaagggctataattacagggaatattttgcttggatattggagtgttcatcatgttaaaacccgaacagatcgcgtccgtcaagggccgcggcttcctcatcaatcgcggcacagagtgcttctccggccgtctcgtctgcgccggcgcggtcttcaccgctgccgacctgcgcaccatctccgagattgccgaaaaattcggcagcggcaaggtgacgttcacctcccgcctgtccgccgagatcgtcggcatccccttcgagcagattgacgccgcctgcgattacgctgccgagcgtggcctctacttcggcggcaccggcgctaaaatacgccccgtcaccgcatgtaagggcaccacgtgcgtctacggcaactacgacacacaggcgctcgccaaagagctgcacgaaaaatactacgtcggctgggcaaatgtcaaactgccgcacaagttcaaaatcggcatcggcggctgcccgaacagctgcatgaagccttccttaaacgatttcggcatcgagagccaccgcgtgccgatcttcgacgaagacacctgccgcggctgcaaggtctgcatggtggaaaaatcatgtccctccaaggctgcacacgtcgaaaacggcaaattacatatcgatgaaaagtgtctcgcctgcggcgtctgcaccggcaaatgcccgtttaaggctgtccgccacgaaagcccggtcgtttaccgcatttatgtcggtggcacgtggggcaagcaaacacgcatgggcacgccgctcagccgcttcgtcacccgcgcggagatcgagcccctactcgagaagaccatgctctggttcaaggaaaacgccatgcccaaagaacgcctcggcaaagctattgaccgtcttggcatcgaaaaattcgagcacgacgtcttctccgatgagcttctgaaccgccgcgaggagatcctcacaaaataattccgaaaggataccctatgaaactcaagtccctcacagcactcgcgctttccaccgtactgctcttttccggctgcgccgccccggcgcaaaacgaaaccacctctgaaagctcctccgccgctcccgaaacgaccgccgtctccgagcgcgtcattacggattcctacggcaccaaaacggagctccccgatgacccgtgcgtcgtctccctttacggctcgtttgccgagtgctggctgctttccggcggtaaactcgccggtattaccgaagatgccgtagacgagcacggcatcgaaatcgatgacgataccgcgctcgtcggcaccgtcatggagccgaatcttgagagcatcgcggcactctccccggattacgtgattttatccgccgacctgcccgcccacgcggagctcgattccgccctcaccgatatgcagattccccacggctgttttcacatggataacgtcatggattatgcaaagatcatgctgaatttctgcgccgtcaacgacccggacggtgaaaaatacgacgaaaacgtcacgcaggttttaaagcgcattgaatctataaagcaggagacagccgaaaagctctccgggcagaaagctcccaccgtcctgcttttgcgcgcttattccaccggcgtcaaggccaaaggcgaagataccgttgcgggcgccattttgaaagaactcggtgcgcacaacatcgcagacgataacgaaagcctgctcgaagacctcagcttggaatccgtcatcgaagccgacccggactacatcctcgtcatgacgatgggcagcgaagaaaacgccaagacctacatggcagagaacatcgaaaataaccccgcatggagcgagctctccgccgtgaaaaacggccgctacatctacctgccgaaagaccttttccactataagcccttaaaccgctgggacgagagctacgcatacattgcaaagctccttttgaacgaagatgcgtaagaaaattttatttcccgcagcgctcctgctgctcgttttctcctttgtgctgagtctctgtgtcggctcggcacaaatttctattcgcgaagctgtctctgccctgcaaaacggcagtttaacgcccgacagccgcatcctgttctacgtgcgcctgccgcgcgcccttgccgccgtgctctcgggtgcagcacttgcggtctccggtgtgctcttgcagaatgtcttaaataacgcccttgccgcaccgaacatcatcggtgtcaacgccggggcgggctttgccgtgctgtttttgctcgccgtctttcccacagccaccgcgtttttgccgtttgcagcattccttggcgctcttttcgcgtcgctgctcatttatgccgtcgcggcaaaaagcggtgcttcccgcacaacgatcaccctcgcgggcgtggccttaagcagtgttttcaccgccggcagcaacgtcataaagacctttttcccggataccatctataattccagctcctttttcatcggcggattttccggcatcgcgtacaaaaatctcacccccgcgtggattgccatcctgcttggtctgctccttgccgtgctgttttccggcgaaatggacgttctctccctcggcgacgagaccgcgcagtcgctcggcatgcgtgtgcaaggaacacgctttctcctgctcatgacggccagcctgcttgcaggcggcgcagtcagcttttcggggcttctcggcttcgtggggctcatcgtaccgcacatcctgcgccacttcatcggcgcgcgccaccgcatcttagtgccgctttcggccctcttcggcgcgtcattcgtcttattgtgcgataccctcagccgcacgctgttttccccgtatgagattcccgtcggcatcgtactgtcgctgctcggcggcccgttcttccttttcctcatcgtgcgcaaaaaaggaggaaaactcgaatgaaccgaaacctttccaccgccttaaaattcgctgacctttgcgtcacgttaaatcacgccgaaattctccgcggagtctcaggcgaactccgccgcggcgaagtcaccggcatcctcggcccaaacggctgcggcaaaacaacgctgctccgcgcgctctgccgccttattaaagcggattccggcagcatcaccctgtgcggcggtaccgcggaaaccaacattgctgcccttgcccccaaagctctcgcgcggcgcgtctcgttcctgccgcagcaaagggccgtgccggatatcaccgtcaaaacgctcgtctcccatgggcgctatccctacctcggcttttcgcgcacgctgtccaataaagaccgcaccgtcattcaaaacgcgcttaaaactgccggtgtgtcggcctttgccgaccgccgcctgcccatgctttcgggcggcgagcgccagcgcgtgttcctcgccatgcttttagcgcaaaacactgacgtcgtcctgctcgatgagcccactacttaccttgatgcgcaccataaattcgagctcatggcgctcctctctacgctcaaagcgcaaaacaaagccgtcggcatcgtcctgcacgagctccccctcgcgttcaagttctgtgaccgcctgcttctcatggaaaacggccaaatcatgcaaagcggcacgccggaggagctattaaaaaccggccttatcgagcatctgttcggcgtttccctcacccccgttatgctcgacaaagaggtggagtacatcgaacgtaaaattcacagttgacatttcgcacttttgcgtgtacaataaggccacaagctaaagtacttttgtaactgacggaatacaagatggggacatcgtggagcaaaagtatgaaaatgagccgaccgtctgggcagtgttttgaaagcactgccctgtttttatgtcagcagcttccaaaacaaggaaatttgcacggcaaaacgccggaaaggaatgggaaactatgaacgcttggagagattttaaaggcggtaagtggcaggatcgcatcgatgtccgcgacttcatccagaaaaactacaccccctacacgggcgacgaaagctttttgcagcccccgaccgcacgcaccgaaaaaatgctcgaaaagtacgaggccctctgccgcgccgagcagcaaaacggcggcgttttgaacatcgataccgaaaccgtcatcaccgccacgtctttcggccccggctaccttgataaggaaaacgagatcatcgtcggcctccagaccgatgagccgttaaagcgcgcttgcaacccgttcggcggcatgcgcatggtgcgctccgcctgcgaagcctacggctacaaggtctccgataaaatcgaagaggagtttaaataccacaagacccacaacgacggcgtgttctctgcctatacggatgacgtgcgcgccgcacgccacgccggcatcatcaccggcctgccggatgcctacggccgcggccgcatcatcggcgattaccgccgcgttccgctctacggcgtaaaccgtttgattctccaaaagcagaaagataaagccgacctcggcaaaaatcccctcacggccgataccattcgcctttccgaagaagtcaccgaccagatcaccgcgctcaaggacatggtgaaaatggccgccatgtacggttacgacatcacccgcccggcagaaaacgcccgcgaggctgtgcagtggctctatttcgcatatctcgccgccatcaaagagcagaacggtgccgccatgagcctcggccgcacctccacattccttgacatttattttgaacgtgacctcaaagaaggcgtactcgatgaatccggcgcacaggagatcatggacgatttcgtcttaaagctccgcatggcgcgccacctgcgcacacccgaatacaacgagctttttggcggcgaccccatgtggatcaccgagtccctcggcggcaccggcgaggacggccgcacgctcgtcaccaaaaactcttaccgcatgctccatacgctctataacctccacccgtccccggagccgaacctcaccgtgctgtggtcgaagcacctgccggaaaactggaagcgtttcgtcgcgaaggtctcctgcgataccgatgccatccagtacgagagcgacaccgttatgcgccccgcattcggtgatgattacgccattgcctgctgcgtctccgccatgcgcgtcggcaaagatatgcagttcttcggtgcacgcgcaaaccttgcaaagctcgtgctgctcgccatcaatggcggcatggacgaagtgaaaaagacccgcgtcgcacctgaaatgcctgtctggccggacgaatacgtcgatttcgacggcctcctcaaccgcctcgatttctaccgcgattggctcgcaaaaacttacgtcgatgccatgaacaccatccactacatgcacgacaaatacgcctacgaaaagagccagatggcgctgcacgatacgaacgtccgccgtttgatggcgttcggcatcgccggcatgagctgtatggcagactccctttccgccattaaatatgccaaggtgcgctgcatccgcgaccccgagaccggcctcgtcaccgacttcgagaccgagggtgagttcccgtgctttggcaatgacgacccgcgtgtcgattccatcgcctgcgagcaggtgcgccgcttctacgatgccctgcgcgaatacccgctctatcgcggcgcacagcacacgctgtccattttgaccatcacctccaacgttatgtacggcaaaaagaccggcaacacgccggatggccgcaaactcggcgagccgctcgccccgggcgcaaaccccatgagcggccgtgataaatccggcgcgctcgcagagctcaactccgtcgcaaagctttcttatgattattgccgcgacggcatctcgaacacgttctccatcattccggaagccctcggcaaaacggaggaagaccgcatcacaaacctcgtccagctcctttcgggctacttcattcagggtgcgcatcacctcaacgtcaacgtcatgaaccgcgaaacgctcatcgatgcctaccataacccggaaaaatatcccaacctcaccatccgcgtttccggctatgcggtcaacttccaccgtctctccaaagagcagcagcgcgaagtcatctcccgcacattccatgaggcaatctaatggaaggccgcgtcagctccgtacagtccatgggcgcggtagacggccccggcctgcgctacgtcgtctttctgcaaggctgcccgctgcgctgcgcctactgccataaccccgaaacgtgggacttaaccggcggcacgccctacacagcagaggatctctgcaaaacaatcttccgttaccgcccctacttcggcgaaaatggaggtgtcaccgtctcgggcggcgaaccgcttttgcagcccgagttcgtcgcagaattattccggcgcctgcatgaacacaacatccacaccgcgctcgataccgccggcgccggcgacctttcccgtgccaagcaggttctcaagcacacagacctcgtcctttgcgacatcaagttccccacggaagcgcagtacaaagcccactgcggcggctccttgcagcacacggtcgatttcatgcgccttacggaatcgatgcatattcccctttgggtgcgccacgtcgtcgcgcccggtctttccgatacggttgagagccttcgcgccgtcaaagctctcgcggagtcgttctccaatttggagaaaatcgagtggctgccgtttaaaaacatctgcgccgccaaatacaagacgcttcatatcccgttccccatgggcgacaaaccctcgttctcacaaagccacgtcgaagcgctcctttcaaagctataatttcatccaaaaaggctgtcccgcactttgccgggcagccttttcgttttcatctctatttccgttttgatatagatttatacattttttgaaaaattcacaatttcaatcgtcacagtcacgtgtttttatgctataataaaagtgattttcgttcaaccaccccacaacacataagaaaggtcgtgaggcatcgattgaagctaagacaaatcctctctgaaaaatggaaggaagcgcttcaggctgtccttcccatcatcaccatcgtgctggcgctctcgttcaccattgcgccgctctcgccaagcgttctgctgtgctttttaatgggcgccgtgctcattttagtcggcatgatgttcttcaccaccggcgcggagaccgccatgacccccatgggcgagcgcatcggtaccgccatgacaaaaacgaaaaagctcggtgtcgttatcacgctttcgtttttgctcggctttatcatcacggtctcggagccggacttacaggtgctcgcatcgcaggtgccgtccgtgccgaatttaattctcattctatccgtcgcatgcggtgtcggcgtgtttcttgtcgtgtcgcttctgcgcatgctgttttctatcgcgctgccgccgctgcttgtcggatgctacgccgtcgtgtttcttctggcgttctttgtcccgccggaatttctcgccgtcgcgttcgattccggcggcgtgacgaccggccccatgaccgtgccgttcatcatggcgctcggcgtcggcatctcggccatccgcagcgaccgccacgcggcagacgacagcttcggcctcgttgcgctctcgtccatcggccccattttggccgtcatgatcctcggcatcatctacaatccgaatgaaagcacctacacgccgcccatcctgcccgaaatgcaggattcctcggagcttttcgagctgttccgcaccggtatcccgacctacctcatcgagattgccgtctctctcctgccgatcattctctttttcctcgcggcgcagtttctcgttctgcggctttctaagcgcaaattattccagattggcatgggcctcgtttatacatacatcggccttgtactgtttcttaccggtgcaaatgtcggcttcatgcccgccggtcattacctcgggcagcagttagcttcctataaatattccgctgtcgtcattcccgtcgctatggtcatgggctatttcattgttcgcgcagagcccgccgtgtacgttctcaatcgtcaggtcgaggagatcacagacggcgccatctccgccaaggccatgggcatcgggctttctgtcggcgtgtccatctcgcttgggctcgccatgatccgcgtcctcaccggcatttcgattttgtggttcctcatcccgggctacgcgctcgcgctcatcatctcgttttttgtcccgaagatctacaccgccatcgcgtttgactccggcggcgtcgcttccggccccatgactgcggcatttctgctctccctcgcacagggcgcgtgcacggccgtcggcggcaacatggtcacagatgccttcggtgtcgttgccatggtcgccatgacgccgctcatcaccattcaggtcatgggcctcgcggcaaagctcatgcagcgccgtaaaacggagaccgccgcacccgccgcattcgccgatatggacgaaaacgcaatcatcgaactgtaaaggagggcgtttatgggcgacaatttatactggatgattaccattacagaccgcaaccaaagccagaaatttctgtcattttataaaacctatgggatcgaggtcgtgctcagcacgctcggcaaaggcaccgccgcgtccgaaattctaaacgatttcggacttgaagccacgcaaaaagccgtgctgctttccgttgtcaccggcaaggtctggagtgccgtgcaaaagggactgcagaccatcatgctcatcgatattcccggcaccggcatcgcgttcaccatgccgctcagcagtatcggcggcaaacgtcagctggagtttttaacgaacggtcagccgtttcagaaaggagaggaaagcgtcttgaaagataccaaatacgagcttctggtcgtcatcgcaaaccagggctataccgagcagattatggccgcagcgcgccgcgaaaacgcaggcggcggcaccgtcatccacgcaaagggcaccggcatggagggagcggaaaagttcctcggcgtttccctcgccagtgaaaaagagcttgtgctcatcgtcgtaaagcacgcggataaaaacaacgtcatgactgccattatgcaggaagccgggcttgagaccaaagcgaaagccatcgtcttttccctgcccgtcaccggcactgccggccttagattacaggacttaaacgaagaaaacacataaaacaacgaccgtaacaaaatatctgcacataacaaaatcaccctcgccggaggaaatccgcgaaggtgatttttgtcattctattattatgttggcaaagagaatatctgattgatcaaatcagcccttaacagcgccgatcgtgatgcccttgacgaagtacttctggaagaacggataaacaacgagcaccggcagaacaccgacaacggcgattgccatcttgatgcccgtgctcggcatgttcgccgtaatctcagctgcagccgcagcgtccataccgctcttcagcgcctgcacgtctcgcagcatgtcattcaaaagaacctgtatactgtaaaggctcttgttctgctggagatagtaaagaccgtttttccaatcgttccagtaggaaagaccgataagcagtgtcatcgttgcaaccatcggaatgctcatcggcagaacgatcgtcagcaggattctgaactcgcccgcaccgtcaatgcgcgccgcttcaataacagcttccggaatgttcgtggagaagtacgtgcgcatcatgatcacgtagaacgcgttgaccataagggacggaatgatgagcgcccaaatcgtgttgctcaccttgatgtaacgggtgtacatgatgtacgtcggcacaagaccgccggagaacagcatcgtgaagaacacgtagaacgcaagaccgttgcggcccggtaggtcgcggcgggacagcgggtaagccatgaggatcgtcatggaaaggccgcacagcgtacccacaactgtggagaggattgtgatgccgtacgcggagataatcttgttgctgctcttaaacatgtactggtaagcattcagacttagtgccttcgggaacagcgtgtagccgttgcggatcaattcctgctcgtccgtaatggaggacataatgagcagaaggaacgggaagatgcagcacagggaaaggataaccatcgcaatgtgtgcgccgacctgaaaccctttgtttttttcgaccatggtgtttctctctcccttccttagaacagtgcgttttcttcgccgccgattttcttaacggcaaggttcgcgcacaggaccagtataaagccgacaacgctctggtaaacgcctgctgcggaagatctgccgtaatcgttcagcgtgatgagtgcgcggtaaacgtacgtatcaatcgtgctcgtaatgtcgagcagcgggccggaatccatcggcacctgatagaacagaccgaaatcggaatagaaaatcttgccgatagacatcagtgtcagcgtgatgatggtgggcagaaggctcggcagcgtaacgtgaacgatttgctgccagcggtttgcgccgtcgatgaccgccgcctcatagtagccgtggtcaatgccgacgagcgttgcataatagaggatgcagtcgtagccgaacaccttccagatatgtacgatgaccaaaatgaacggccagtacttcggctctgtataccaggaaatcggcttaacgccaagtgccttaaagatcgtgttgttgataaagccggattcagagctcagcattgcgaacaccagatagctgaccacaacgatggagatcaggtacggcatcagaatgatggtctggtacacctgcttgaacaacttgctcgtaatctcgtttaagagaatcgcgattgtaatggcaatcacggtgcccagcacgataaagcacaggttataaagcagtgtgttgcgcgtaatgttgaaagcgtccttcgttttaaaaaggtaggtgaagttgctgaaacccacccagtcacttgcaaggatgcccttacgccagttgaccttcttgaaggcgatgatcagaccgctcatcgggatatacttatccatgagcagatacagggcgcccggaaggaacatcagatacagcgggatgcagcggtaaaagcgcagccacttattcggttttgccgagcgcactttcatttctttttccagtgcggcagatttattcggcataattagaaacccctttcaatctgttttcgtcctgctccgttgaaattctccaaaagaacatgggcatgtacagaagggtcatctctctgtacacgcccatgcccttttccctctcgggaaaaagacacggattttcacaaggaagctgaaacgaatctcgctccagcttctttaagtctaattgtgaagtaaattacttctgctcagccagccaagcgtcgagctgtgcctgcttctctgcgatgatcgcatcgatgccggcatccttcagctcagagttgaactgcgggagagtcgtctccgggtcaagagcgccgcaaccgagtgccttgtggtacttgttaacaacgttcgtgcaagcggtgatctcgttcgcaaccttggttgcgtcgaaggtgaagccgaatgctgcggacttctgagactcttcgttgaatttcttcgttacatcccagtaatcagccgggagatcggtgccccagatgtcgccgatgaactggttcggcatcagccaagtaccggactttctgtaagtggtggtcgttgcatcaaggccgtccggatagttgattctgtcctgaccgttcgtaacagcgcctttctcgattacttcgtagtgaacgccctcaataccgtacatgtagaggttgctcagctccgggttgctgtaaagctcgttcagagtcttcatagcagcttccggatgctcgcagctgcctgcgatggaccacagacccatggtaacacggtcggtggtagccagtgccggaaccagctcaaccgtgccgatcgggttcttgaggttcgcgttgttctcttctgcatagtacggcttcaggttagtgaaggtaccgaatccagtgcctgcatccatcagagtggttgcagtctcggtggtgttcacggcgtcagcctgaatgaggccttcctgcatccagttgtacatcgtggtaacgaggttcttgtactgctcagtctcgtagaggttcacaacggtggtgtccgtagccatgtcggggagaacaccgaggttaaccatctcgtcgcccagagagtcccaaccccaggcacggatgttttcgccggcggaaatagctaccggccagcagttctcttcgttttccttaatggtaacgagaacatcgtggaggtcttcgagggtcttaacggaatccatgtcgaggttatacttctcggcaaggtccagtctgtacgcaaagccataggaagctgcaagatcacgaccctccgtgaggccgaacagctcgccgcctacgcgaccgcagttgatgttgtcccaaccgagctgctcaatgatgccctggccgtacttctcgatgagatcatccatcggatagagctgaccggaatcagcgcaagccgtgtagttgaccatgtaaaccgggagaaggtcaacgccttcgccggaggaaagcatcagggagatctggtcagcatagctgctgaacgggaggaaggaaagtttaacgttcacgttgaacttctcttcgaggatcttgtccattgcttcctcaacctgtgcgataccggattcttctttaccgcctgccatcgtcacgatgttgagggttacgagttcggactctttcagatcttctgcttcggaagaggcatcgctgctatcagccgcagcgctgtcagaagcggaagattcggaagatgtgctggagtctgcggtggagccggaagaaccgccgttgccgcaagctgccagggagagggtcagcgctgctgccatgagcattgctacaagtctctttgccattttcttacttcctttcatacttttcgacctgcgataaatttatttttagccttcgcggtcaaattacacatatatagtaacagaaaatccgcaccttttctgcaaatttcgtgacatctcctattcaaaatgtgacatatttgtgaagactttgcaggatgtcctttacaatcctgcatatcgatactctatatcgataaaaaaagaggaaaacccacatgggtgtccctctttcaaatgcaagatacgctctctgtctttcacccgtttacacggattttacattttgtgacagttttacaacaatttaccgaaataaaacgcgctttacagcttagaccgccgctttgccgcacggtattccaccggtgacatgcctgtgtattttttaaaaacctgcgaaaaatacgagaaattcgagtaccccaccttcgtcgcaatcaggctcaccggaatattcgtgtcactcagcaaagactgtgccgcgcgcatcttctccgtcacaatataatcatttaaagaggcgcccgtttcctttttaaataagcgggaaaggtactccgggtttaaataaatcgcgtccgcgatctccgcgcggctcaaatctttgtcgatgttccgccggatatacgtcatcgcgcgttgtatcggcgtctgctccgtcttgtccggctccttctccgcactgtcatcctcgccgcggtacttcgcataagcgttgtaccgtctctggttttccgcttcgcgcacttttccggccgcgcgctccaccgccgcctcaatctccgcatacggcgcaggctgcaaaatatagtcaaagctgcccagcttcacagcctcctgcgcatattcaaattccgcgtgcgcagaaaggaaaatacacaccacgccggaaaaccgctcctgcgcccaacgcagcaaagcaaagccattcgtcggcggcatttcaatgtcgcacagcagcacatctatgcgctcgcgttcaaaaacgctttgcgcttccttcacgctgtacgccgtaaacacctgttccacgggtatttctttccagtttacaccggtcaccatgctctccacaacttccggctggtcatctacgatcaatacgttcatccgttgaaagcctcctctccgtccggctcgtcctccgccacattcagcatctcgcgatctatcggaatcaaaatttcagatacactgcccatgcgttcgcccatatcccgattaaagaacgcatataaagcgcggtcaccgtaaatcagctgcaagcgctttttcacattgttgatgcccacgtggttctgcgcgtacagcgggctgtccggctcgttaatctccgcaatcacgtcctcggggaagccgccgccgttgtccgtcaccgtcaggtcggcaaacgtgtccgcgccgctgcgcagcaccgccgccttcacttcgatttccaaaacataatccggcgagtacacatgcttcacgcagttttccacaaagctctgcaaagaaagcggcgggatcggcagctccttcaaatgcgaatcaatatcaaaccggcacaccggcgggtactgcgaagatccccgctgcatctcgatgtaattttcaatgtggtctaattcgcgcgaaagcggcacaagctccatgctgtccgtaaaaatgtaccgaatgtgcttcgaaatctccaaaatcatcttctgtatgcggtcatatttgcccgcttcagccaacgcatataagcttttgaggcaatttaaaaagaaatgcgggcgaatctgaagctgcatgtaacgcagctccgctttctgcgtctcaatctcgtgctcataagattcgatcttgaggtctttaatctgcgtcatcattgtgttgaacgtctcgttcacctcattgaattcgcgtatgttcgtcttgccctcagccttcgcccccaaatcgccggcacggatatgctccataacactgcgcagcccctctaccggcttcgagatggagttcgtcagccgccactgaatgaccggaatcagcaccagcgccagcaaagagagtacaagcagcgccgcctgcaagccatcgagcgagccgaaatacccgctttcgtttacggcaaggattgccctgcaatccgtacccgccaaatcacggcccacgatcatataccgctgctttccgcccgaaataaagtagctctcatagtcgccgttcaaatcgatcccgttatcctccacaaaatcgacagaggtcagcggctcgttatttttatcggaaaacaacatcaccgcgtcggtgtcaatctgcgtgtagcgcacgtccgccagcgccgccaacggcaccatcgccacaaggtacgtgccgcgcccgccgtaaaaacggaataaatatgccttgccgccgatttccgcgtgccgccactgcatattgtacgaatacgtgttgttctccgccgcgtcacgcacaaaagcgcgcagccgctccttttgcgcataggggatagaatcgtcaaaaatatcgcgctcggcatcgctcggcacgctgtaaatgaaaaacgcgcccacatcaccgtatgccggcagcgccgttttcaactgcgtaatgagcgtatagcttgcaagatacgcctttaaggggtttttctcaccgcccgaaagcgtgcggtaatcgtcgctcaccgtcagcccggtgagaaaatcgttcacagaatcaagctgctcctccatgcgccctacccggtaatccatcgtgcgcatgttggaatccgcaattttcctgttaaatgcctgcgtggaatacaggttactgaataaaagcagcgcgatcagcggcagcgtgacgctcaatacagccgtcatcagttttcgcctgaacgagacttctttcttcgaacttttcatgccgcgcgatcctttcatctataatatagtatagaatgatgatacaatatcatagcagattttaaagcatttcgcaagtcaaaatccaaaagaaccgtgtacgcgcaagattgaaataagcgccctttcgtggtatactgaagctatatcaacggaaaagacgggaaacaagcacgttttccgcagaaaggtcgttcagatgacggaacataacgccacttctctcagcgccagccttgtgaaccgtaaggtctacaccgtgtgctacaccgggctcgatacgctgtcttcgtttcacgatgctctttatgaagcgcgccgcagctatttcggctccggcaaaaccgtacatatccgcgcccgcggcattttcgacgggctttccggcgaggtgcacggcaagctctcccgccgcactataaaatggaaaaaacgcgcaggcaaaaatacgctcgaagccgcattcacaaacggcggtcagcgcggcatcgcgttttataacgcctacggcgcattgcgcgcccgcgtgtactacgacggtgaaatgcagtggatgcgcacggagtatttctctcccgatgatgaccgccgcgcgcgcattacctttaagccggacgaccaccgcgacgccgtcatccgcttcgattataacgattctaccggcaaaacgaaagaaaccgtgctgttccccgtgccgtatgcattccaaaccgccgagcagagtttgcaaaacgcccagttcggcgaccgccttctgctcgtcgccgatgagcgcggcgaatacgcctactgcccgcgtgaagagcagcagcgccgcatcaaatttctgaagcagaataaaaacgcctccgtcatgctctccatgggttgggagatcaaggacggcgacgtgcccgaaacgaccgagccggagcccgagctgcccgttttcgaaaacctcaccgaacccgcacttgtcgatttcctgagcgaccccgccgaaaaagccgcagaacctaccgaagaggaacccgttctcgaagaagctgcttccgaagcacccgaagccgagccgcagcccgaaacagaacccgagacgaaagaagtcgaagaatccctcattgaggacactcccgcagaagaacccgaagaagccccggaagaacctgctcccgaagaaacgccaaatacagaccgcgcccccgacatcacgccggaagagctccggcaggcacgtactttgcttgataagctcctgcctgcaaaggaagctgaaaaagaggacgaccccgaaaccggcatcacgctcatcagaggcggcgcgccgctccgttacacaggcgacctttccgaagacggcaaacgcgagggcttcggccgcaccgtgaacaacaacggcatcacgctctatgaaggcgagtacaaaaacgacctgcgcgaggggttcggcgtgcaccactaccgcagcggcgccgtctcctacatcggcgacttcaaagacgatcagcgcgaaggcttcggcgtttcgttccgcgaaagcgaccacgcgctgcacatttcccactggcaaaacggtaagccgcaaggcatggcaacgattttcaataaaaacggagatttaatttacaacggccaaatcatcgacggccaaaagcagggcgcaggtgtctccgtcgaccccgaaacgcactgcgtgttcgtcgaaaaatatgaaaacaacgaaaaagcgggtcaagctaccctgttcgatgcagacggcaatttaatttattccggtggctggcagaacggtaaacggcagggtcacggcacagcgttcgacaaaaacggcaatgtcgtctacaccggcgagtggaaagatgaccgctatgaaaacggcattttgtaccgccacgtgcagaacgaggacaaagcgtaatggaccgcgttgaactgcacgacgtggaatacggcgactgcaccgtcctcgttgggcaaaaccggcagattttaatggtggattgcggctccgtcagccgctacgcccgccgcggtgaagaggagattgaccgccgttttaacgaaattttcagccgctatgcgcccgcctcccagcgccagtttctgctcacgcactaccaccgcgaccacatgagcggctttttaaagcaagtcaaaaaggatcccggctactttgaccgcgtatacctccccgccctcccgtgtgataagcgcggcgtaaatcccgttttggagttcgccgtgttcgcgcattttttcgccgttccgcaaagtgacttcgcgcaggtgaacaccacttgcctgcgtattttcgacgcgctcaatgattctgtcggcgcagaccgcattttcacgctcggcggcggcgacatcttcacatttgacggcgcgttttacgaggtgctctcccccgcgcgtaacgagcccttcccgttcgatgccatcctgacggaagccgtcgaaaacctcaacatctgcctctcttccccgtttcacaccgggcgcgaaacggagtttttggagacgaaggatgcgttcgttaggctctacatgcagtgtcaaacggccttcgcgccgtccgaccgcgccacgcccggcagacggcgcatcctgcttgattctctccgcgacctcttaggccgcatggaggatatgcgcagcaacctcgcccattcccccgccgcgccggatattcaggacattttaaatcaatccgtcgtgcgcaacgtctacaccgaaacgcagaacgacctctccctcgtctttcacaaccgccgaagccgcggcccgtcgaacctcgatattctaatgaccggcgacgtgtccgatgaagtgctgcgccgcatctccgggaagctgtttgacggctactatatcgtcaaagcgccgcaccacggcacagaaagccacttttcaaacgttatcggcgacctcgccgttgcgcacctgctcatctccaacggtgattaccacgcgggcggcgaaatttcccagcgctacatcgatatggagtgcatcaagcactgcacaaacgccggggcatgccgctggcgcgacatcgcgggcggatgctgcaaccggctgcaacggtgctacgagcagcccgcttccggctccctgacgctcaaatgcgccgcagccgccggcgagcgccgcacgtcatgcaatatctatgtattcggccacagcggcgttttgggctgccactgcgaccgcgggtagttacttcaacatgttctctacgccgtcaatgagctgccccaccgtgtgcacggccttggcggtgctgcggcgcatctcttttgtgcgcgccttggcggatttcttcccgccgttcatcatcgcggacgaaacggcagccacggcagcgcctgcggcaatgccgagacccacgcccttcacaacgttcatgctctgcttatacatggcatccaacctccagatccagattgcggcttttaaaacatacaaaacagccgtcacgtttagtttccccctttttacaaaaacatacatcattcttcccgaaaggactttgacagcaatgattttgaatatcgttatggtcgagccggagatcccccaaaacgccggcaacgtcgcgcgcacctgcgccgccacgggcgcaagactgcaccttgtgggccccatgggctttaagatcgacgacaaaaagctaaagcgcgccggtctcgattactggcatttgctcgacatcacctattatgactcgctcgacgaattttttgcaaaaaacagcggcgaatttttctttttctccacaaaatccgtccataagcacacggatatacactatcccgataattgctacctcttcttcggcaaagagacagccggactgccggaagatctgcttttcaaaaacaaagaccgctgcgtgcgcatccccatgatttcggaagcgcgcagcctaaacctctccaacagcatcgccatcggcgtttacgaagtcctgcgccagtgggattttcccgcgctctccgaagccggtcgcctgcgcggctacgactgggacgcggcagacgcgaacggtgcgaaataaaaacccgtacaaaatcgcaaaaatgaaaaatttgcgctaaaaagtgtgcaatttgcgcgttatctcttgaaatcatcttccgtttggtataaaataaattctgtaggcggtgttgtccgccaaccaaacgtataaccgtaactcaatatatttcttaaaggagtgtacgaaaatgaactacctcaacaagaaaaccgtagaagacatcgacgttgccggtaagcacgttcttgtccgctgcgatttcaacgtcccgatgaaggacggtgtcatcacggacacaaagcgcatcgtcggtgcgctgcccaccattaagtatctcgtagaccacaacgcaaaggtcatcctctgctcccacatgggtcgcccgcacaacatcttcaacgacgttgtaaagctcgacaagaaggagaagaagaagatcgacgctatgccggaggcagagcaggccgaagcgaccgctaaggcactcgaagctgctaagggcgacgtgaagaagttctccctggcgcctgtcgcagcagagctttccaagctcctcggcaaggaagtcatcatggcaaaagacgttgtaggtccggacgctaaggctaaggctgcagctctgaaggacggcgaagtcctcatgctcgagaatgttcgcttccacgcagaagagaccaagaacgacccggatttcgctaaggcactcgcttccatggctgagatctatgtcaacgatgcattcggcaccgcacaccgtgcacatgcttccacagcaggcgttgcagattacctcccggctgtctgcggctacctcatccagaaggaaatttccatcatgggcggcgcgctcgagaacccgaagcgtccgttcgttgcaatcctcggcggcgctaaggtttccgataagatcggcgtcatcaacaacctgattgaaaaggtcgacacgctcatcatcggcggcggcatggcttacaccttcttcaaggctctcggtcacgagatcggcacctctatctgcgaggacgacaaggttgagctcgctaaggaaatgatggacaaggcgaaggctaagggcatcaacttcctcatcccggtcgataacgttgttgcaaccgagtacagtgcagactccgagtggaagatcgtcgattccgacgacattccggaaggctggatgggtctggatatcggcccgaagagccgcgagctgttcgcaaacgccgtgaagaacgcaggcaccgttgtttggaacggcccgatgggcgtttccgagtgggaaaacttcgcaaacggcaccatcgcggttgcaaaggcagttgcagacagcaacgcgatctccattatcggcggcggcgactccgctgcggctgttgagaagctcggcttcgcggataagatgacgcacatctccacgggcggcggcgcttctctcgaattcctcgagggtcttgagctccccggcattgcttgcctcaacgagaaataattaaaagcatgaacgggagcggagcttgcctctgctcccgtattgttgtctcaataaaaacggtttttaaccgacggaaaggaatagaaaatcatgaacaaggctgttagaaaggctgttatcgccggcaactggaaaatgaacaaaacccctgcggaggcaaaggaactcatcaccgccattgctccgctcgttaaggacgcaggctgcgacgttgtcgcttgcgtgccgtatgtagacatcgcaaccgctattgaggcggctaagggcaccaacatcaagatcggcgcagagaactgccactgggcggtcagcggcgctttcaccggcgagatttccgcagaaatgctgaaggcttgcggcgttgagtacgtcatcaccggccacagcgagagaagaacctacttcggcgataccgacgttacggttcagaagagaacaagagctgcgcttgacgcaggcctcaccgtcatcgtttgcgtaggcgagtacctcgagcagcgcgagcagggcatcaccgatgagctcgttgccatgcagacaaagatcgcactcggcggcgtaaccgaagaagagcttaagcgcatcatcatcgcttacgagccggtttgggccatcggcaccggcaagaccgccacggcagagcaggcaaacgaagtttgcgctgtcattcgtgcgaccgtcaagtccctctacggcgaaaaggctgcagaaggcatcaccgttcagtacggcggctccatgaacgcaggcaacgcagctgagcttcttgcacagccggacgttgacggcggcctcatcggcggcgcttccctgaagccgaacgacttcgcagccatcgtaaaatcagccaccaagggctgatttttccaccgaaagattttttccagttgaaaggaaaggcatctccactatgaaaagacctgttgtactcatgattctggacggtttcggaattgctaaaacggagggcaacgcgattgccgccgctaagagaccgaacctcgataagctgttctctgaaaacccgattacaaagatcggcgcttccggcatggacgtcggtctgccggacggccagatgggcaacagcgaagtcggccacaccaacatcggcgcaggccgcatcgtttatcaggagcttacccgcatcacgaaggcggtacaggacggttctttctttgagaacgaagcgctcgtacacgccatgaataacgcaaaagaaaacggcaccgcgctgcacctcatcggcctgctttccaacggcggcgtgcacagccacaaccagcacctctacggtctgctggaaatggcaaaaaagatgggcgttgaaaacgtctatgttcacgccctgctcgacggccgcgatgttccgccttcctccggcaaggacttcgtcaaggagctcatggagaagatgaaggaaatcggtgtcggcaaggtcgcaacggtcatgggccgttactatgcgatggaccgcgacaaccgctgggagcgcgtagaaaaggcttacaacgccatggtttgccgcgaaggcgaagagttcgcgtgcccggtttgcgctgtatcgaaatcctatgaaaatgaagtcacggacgagttcgtcgtgccgtgcgtcatcaagggcggcgctccggtcgcatccggcgattccgtcgtgttcttcaacttccgcccggaccgcgcaagagagatcacccgtacattcgtagacccggatttctccggcttcacccgcaagaatggcttcttcccgctcacctacgtctgcatgacgcagtatgacgccacgatgccgaacgttgagatcgcattcaagccgcagagccttaaaaacaccctcggcgagtacgtctccgataagggcctcaagcagctccgcattgccgaaaccgagaagtatgcgcatgtcacattcttcttcaacggcggcgtcgagaagcagtatccgggtgaggaccgcatcctcgtcaagtccccgaaggtcgcaacgtatgacctccagccggaaatgagcgcttacgaagtcacggataagatggttgaggccgtcaagtccggcaagtacgatatgatcattctgaactttgcaaactgcgacatggtcggccacaccggcgtgttcgaggctgcaaaggctgccgttgaggctgtcgatacctgcgtcggcaaggtcgcagcagccatcgacgagatgggcggcgtgctgctcatcaccgccgaccacggtaacgcagacaagatggtcgatgatgacggtgaaccgtttaccgcacacaccacaaacccggttccgttctgcgttgtcggttatccgtgcaagctgcgtgagggcggcgttctcgcggacatcgcacccaccatgctgaagatcatggatctgccgcagccggaagaaatgacaggcaagagcatcattctctaattcgatcttgctctaaaatcaaagcattataaacagtctccctttgtgtttcggcacagagggagattttttgttccattttttttataacaatttctaaatatatattgacaaaaccctcctatacatgatatcatgcaggtgtaatatactgccaaaaactatgctcggaggtgatatttttcagcaaaaatctcaaacccaattcataacacaaattcatttgcaccgccgtatccgtcagcgcagccacaaatcctaacatcatcataggaggtcgttttatgaaaaagcttgcattggttttgtcccttgttttgatgctcacgtttgtcggctgttcgtctaagacaaccgtgaaagagacagacgctttccgattcgattccaagaccggctatgcgtattccactgcgccgttcggcatcgacacgacggagcttgaatccgctatcggctctaagctgacaatggtcagcgaaagccccgcgacagcgcctttcgcatatacgaattattcatcggaggacatcgtgcagtccgcagactgctccggcaaatttgatgcgcagtttgacgaaaacggcaagctgttttcggtgacgttccacgaacagcttgcgcgcggcacggcagaagagcattttgaagccgcaagcaaacgcttcaccgaaaccttcggcgcacctgccgttcaagacgacaacggtaccggcactcaatatctcgagtggcaggataaaagcagtggcacggcgctggggcttacatattccgatctcggcacgaccgatccgaccttgatgatctccgtctttgagaagtcccgctacgtcgaagccggaacaggcgagtggaaataaacttaaatatattagaagttgatctataaacaaaatctcccttggctttttgccatgggagatttttgccattttgcggataaattgatatttttaatagaagatattgaaaaatcagcaaagatgctctttgtcgcttaactgtgcttctttgctgctttagccgtattttttaccgaataaagttcgttgcgatgcgctgttccgtttccggcaggccaaatttttccttaccgagcgcaatgctcttcatcaaaaaagtcatatttctcgccaaggtgcgcatggtttgtagaccctccaaatcctctttcgcctcgcctagtgcgaggccgtgaatgctgttccaatactgactggacgcgacgggcatgccggagatcgtaaagaatttgttgagttcgtcgaacgtggcggaaaggccgccgcggcgggcagccacaacggcggcgccgactttcatcgttttatcgaacggagtgctgtaaaacaggcgcgtcaaaagcgcgacaagtgttgcgtttgcggaggcataatacaccggactgccgacgacaagaccgtccgcttccgcaaatttcgtcgcaacttcgttgacaagatcgttaaaaacgcagtgccccagcttagaacattgcccgcatgccacacatcctcggatgtctttgttgccgacatgaataacttccgtttcgataccttctttgttgaaaatatccaccatttcatgcagggcaacagcagtattgccgttcgccttcgggcttccgtttaagagtaagactttcattttccattttcctttctttgtgttttgttgttttctgtatacgcacgcagattactctgcgtttgatccgttaaatttttgaaaggcttatgcgcgtggcgggcgctttctttttcgttccaatcggcgatgacctcgcgcatgcgcttgttcgcttcatcgacctccaccttgaattcggaggccgtaacacgacgcgcgccgtgaccgagtacgatcatctgctctgcgccgtcggacgtggcgacgcgcacacggtgctttttgctgatctcaaacgtggcgcgctcaatgtaggtatctgccgtttccgcctgctttgtgaacacaacggaaatgttgtggtagcggataacgtcctccacgtcacgcgggacgcgataggcatcgaaaacgaggatgcacgtgctgcggctgaagctctgataattgcagattttatccattaaaatctgtcgagcggtgtcgatgtccttttcggcgaccttatttaaatcgtcccacgcaaagagaatattgtagccgtcgatgaggagatactcaggctcgaagaccttttccggcaccttccattccccttttccgctgctttctgcggcgcggacggcgttttgcggctgcatatcgcggcgtcggatagggccgtaggtgcgctcaaaaatggcgcgcagctcatcgtcgaacacaggcggcagctgtgcggcggcgcgcacgggagcttcggtttcggcagattttgttcccggcttttcgggcttccatccactttcgaggtgcatgtgggaagccgcctcgcgccacggcacaacgaagccggagccgtgcgaacagaagacggaatcgccggtgttctccaaatcatgctcggcatcgtagccgatatgctcgatgacctcttcggcattatggcacggcaagtagcccttcggcatacaaataaggctgccaagcccgcgcgtgtacgatgcgacctccaaggtgtaaccctgcatttcggagacgggcgcaaagcccgtgatgacggcattttcaccctcggtctgcggcggctcgaactccgcgcaaaggcgctgcatgtccgaaatggcgcggccgacctgcgactgcggaacctctaatcggaaatcgtaccacggctctaaaagcacgcttttcgcctgtaataagccgtggcgcacggcgcgataggtggcctgacgaaaatcgccgccctcggtgtgctttaaatgcgcacggccgatgagaagcgtgattttcatatccgtgatgggcgagccggtcagcacgccggggtagctgcgctcctcaaggtgcgttaaaatgagattctgccagttgcggtcaagcacatccatgctgcacacggtgccgaaacgcataccgctgccgcgctcgccgggcgctaagagcaggtgcacctcggcgtaatggcgcaggggctcaaaatgccccatgccttcgacgggttcttcgatcgtctcgcggtagacaatgctgccggtaccgaacgtgacctccattttaaagcgctcttttaagacgcgctgcaaaacttcaagctgcaccgcgcccataatctgcacgtgaatttcgtgtaattgctcgttccacacgacatgaagctgggggtcttcttcctccaaaacgcgcaaacagcgcacggcggtgtgcggctccatgccgtccggcaagaagacctgatacgtcaaaaagctttcaagcacgggcgcgggggtgtcttcctccgcaccgagtccctgcccgggatacgtgtgcgtgaggcccgttacggtgcacacgccacccgcggtgacttcctccgcaaggcggaatttcccaccggaatagatgcggagctggtcggctttttctgcccatacgttttcgcccgcgccgcctttaaggaccattttaacgggcaaagcgccgcctgtgatcttcaaatacgtaagccgtgcgccctgattatcgtgtgcgattttgaagacctttgcgccgaaagccttagggtattcgggcatttcggtgtacatttcaagaccgtttaaaagttcttttacgccgtctaacttcaaagccgagccgaaccagcacggaaaaagcttgcgatttttgatgaggcgtttaatctcgggacattcgacttcgcccgtttcgaggtaatgggcgagcgtgtcttcgtcacaaacggcgatgttttcatcgcgttccgcttcgggagatgtgaaatcgacgcaaccggtgctgagcttttgcagttcggctaagactttatcgtggtctgcgccgtcgagatccattttgttgatgaaaaggaacgtggggacgttatagcgctccaaaagccgccacagcgtacgcgtgtggctctgcacaccgtctgtgccgctgatgacgagcacagcgtaatcgagtacctgaagcgtacgctccatttcgctggaaaaatcgacgtgaccgggggtatcgagcagcgtaaacgcggtatgttcgagcggtaaaacggcctgctttgagaaaatggtgatgccgcgctcgcgctcctgcacgtcggtatcgagaaacgcgtcctgatgatcgacgcgcccaagacggcggagctgcccgccttcatacagcatcgcttccgaaagtgtggtcttgccggcatcgacatgcgccaaaagcccaaggcatatttggtttttcgttgtgtttcgcttctgctcgctcatgaaaagtgtctccctgtaccgccgttaaaattaaacttcgatttaataaacagtataccactttttgaagatactgacaatatctcgcgcggaagagagtcgaaattaggcggcgcaaaccaagatttgctattgaaaaaaaccgcgttttttgctatactaaaaacagatttttcgcgggcagataccgaacgcccgcttttttactgtattcggggtgtatcggaaaacaagtttacggcttttcaaatgcaccctaaaggggattattttaggacgcatgagacgtatgaattaaggaaggggaatgaccatgaagaaaatcggttttgacagtcagaagtatatcgagctgcagtctgcacgtattcgcgagcgcattgaccagttcggcggcaagctgtatctggaattcggcggcaagctgtttgacgatttccacgcttcacgcgtgctgccgggctttgagccggacaacaagatcaagatgcttttggcgctgaaagaccaggcggagattgtcattgcgatcaacgcgaacgacattgagaaaaacaagcgccgcagcgaccttggcattacgtatgacacggacgtcatccgtttgattgatattttccgcggcttcggcttatatgtgggcagcatcacgctgacgcagtacgcagaccagccctccgcggcgatttttgagcagcgcatgaagacactggggctgaaggtctaccgccagtaccgcattccggggtacccctctgacgtgaagctcattgtaagcgacgagggctacggccgcaacgactacattgagacgacgcgctcccttgttgtggtgacggcgccgggcccgggcagcggcaaaatggcaacctgcctttcgcagctttaccatgagcacaagcgcggcattaaggcgggctacgcgaagtttgagaccttccccatttggaacctccccttaaagcacccggtgaaccttgcctatgaagcggcgacggctgacctgaatgatatgaacatgatcgacccgttccaccttgaggcgtacggtgagacgactgtaaactacaaccgcgacattgaaatctaccccgtgctgcgtgcgatgtttgagcagatttacggcgagtgcccgtacgcgagcccgacggacatgggcgtgaacatggcgggtctgtccatcatcgacgatgaagtgtgccgtgaagcctcgaagcaggagattattcgccgctactttaagacggcgtgccttgtgcgccaaggtcttgcttccgaagcggaattacagaaaatcgagaacctgatgcgccagctgaagttggagccggagaaccgcccggtcgtgctcgcagcattgaagcgcgcggaagcgacaggacagcccgcggcagctttagagctgccggacggcacgattgtgacggggcgcacatcggaattgctgggtgcttcctctgcgttgacactgaacgctttgaagatgcttgcaggcattccgcacgaggtgaagctcatctcgccgacggtcattgcgcctattcagacgctgaaaaccgactacatgcagagccgaaacccgcgcttgcacaccgatgagatgttggtggcgctcgccatcagcgcggcgaccgacgaaaacgcgatgcgcgccatgcagaagctggacgagctgagcggctgtgatttgcactccagcgtaatcctcggcacggtagacgacagcgtattcaaacgccttggcatcaacgtgacgtgcgaagcaacgtatgaggacaataacctctaccacaaataatctttcttgtaatataaaaccgctcgaagccgtaaagcccgagcggtttttgttataggaattttcggatttaaattgtaaaatagcggccggtaatgatcttttgcacaagattcgaaattttgcggctatccgtaaaatcatccttgcgaatagcgtaaaccaccatgctgatgatcgcgccggcaagaaatgaaatggcgtaatcacggtcttcgtggtcataagcgtggaaaatattgtccaaatgcaggagatacgcttccgatttttcgcgagccaatgtatccagatgattttcgaccagaagactgaggagttttttctgctccacaaaacactccataatagaatcacatagactgcgaatggtgtaagcgcgcttttccgcaatgaatcgtttgcggtattcttcaaaaagccggtcgagccgacgcccaatgacctcttccttattttcaaacagcgagtaaaacgtctggcgtgaaacgccggcgtgggcacaaacggcttttatcgtgattttttgaaacggctcttcctccataagtgctaaaagtgcctctgtgatgaggttctgcgattgcagcgccgttggattttttccctgatacatagacattccctcctgtttcgtcaatattttcactcaacttggacaaatgtcaaattgacaagtgtcaatggttcatattataatgactttataagaggttgtcaagacgagactctcggcaaaattgtgaattttttgtggcgcgaaatttttggggagtgtgtgaaaaacatggaagtgcgcgacgctttatatattattttcgggtatctcctgggcagtattttgtttgcgcggctcggtgggctgatctttaaaaagacagacattatggcggaaagcccggacaagaacccgggcacaatgaatgcgtttacatacggtgggttccggtgcggcgtgtttacgctgtgcggcgacctgttcaagggctttttgccggtttttttgtaccgcagcggagaactgcccgaaaacccgctgatgctctcttttgtgatggcggcgccggtcttgggccatattctgccgttttatgacattaaacacggcggcaaaggcattgcggcaacgtttgggtgctttttggggctgctgccgcactggatccctctgtgcgttttggcgagcatcttcattttcttttcgtgcgttgttaaaatcaacccgaactattaccgcacagtggcgacgtatatcctggcggccatttgcacggtttggctggagccaaaccgctatatcgtcttcggctttttgctgattgcggcttcggtgctcgcaaagctctttatgagtgccgaggaaaaagaacactttgaggtgaaacttgcatggaagcactgattttatcctgcagcacgggcggcgggcacaacacggcggcacaagcggtttttgaggcgctgacggaacgcgggcaccacgccgtgcgcatggacccgtacacgctggtgagcgaggagcttgcaaataaagtcgggcagacctatataaagttggtacagaaaagcccgaagctgtttggcgcggtctatgacctcggtaacgcgtaccgtaagctgccggggcgctcgccggtgtaccacatcaacggcaaaatggcgccgtacatgcagaaataccttgcgaaacacctaacggacgtgatcgtctgcacgcatttgtacccggcggagattttgacgcacatgcggctaaacggcatggaaacgccgccgtttgtgtttattgcgacggactacacttgcgttccgtttacggaggaatcggactgcgacttgtacgtgacgccctccccgcttttgagcagcgatttcaccgggcgaggcattcctgcggaaaaattgcggccgctgggcatcccggtgcggctggatttttccgatgataccatcacgaaagacagagcgcgggaagcgcttaacttgccgaaagacaggcgcacgttgctgctttccggcgggagcatgggcgcgggggcaattattaatgccgtgcgggcactgctgccgtatttgaagcaaaatgcaaactgcgacctcaacattttgtgcggcagcaatgaggcgctgtttgacagcgtggaaactgaatttgcagaaaatgggcaaatcacgccgatgcacagcacgaacaaaatggcactgtatttaaaggcaagcaacgtatttatctcgaagccgggcggactttcatctacggagagcgccgcggcgggcgtgccgcttgtgcacatttcgccgatacccgggtgcgaaagccgcaacgcggagttttttgccaaggagggtatcgccgtaaaggtggaaaacacagaaacagagcttttgtcggcggtggaaaggctttcggagccgggaaatgcagaagaaatgcgcaaacggcagagagcagttatcaatcaaaatgcagccatagatatttgcgagctgttggaaacggtagcacagtgatgacgcaaaatgtgggttaaaagtttttgatcgaccttttttcaaaaaaggtcgcggattcttagggctgagccctaagccgaactccgcagagttcggaatacttttgcctaactcaaaactaggaaggtagatttgaacgtccgggggacgttcaaattgtagggaacccagttgcatgggttccctgaaagagcggctttgcgccgctttttttatatacacagtttttttctaagtgaaaggtaccgtgaagttcattagcacgctgtatcacttcctttccctctgtcagagggagccgacataaaaagagccactgtgattactcgcagtggctcttaaacaccttaaatttaaatttagaaacgatcgcgcttgacgtaagacgtatgcagcagctcgtgtgccttatggcagccgggctcgccgcccatccattcgtagcactccttgacgacggggttcaggtggctctttctgagcgtcttggccgcgtcctcatcgtagagggcttttgcacgcagggccttaatgtccgtgaagctgcgaaccgtagacggctgaatcggctggccgccgccgtttacgcaaccgcccgggcagcacatgacttccacgatgtggtagtcggcttcgccgctttcaatcttcttgagcagctcgtttgcgttattcagaccgctgacgacagcgaccttgacatccataccggcaaccttgtaaacagcttccttgaagcccttcgtaccgcgaatctctttgtactcgatgttatcgtggtcgacgccctcaagcacatcggctgcggtacggagcgctgcttccagaacgccgcccgtcgcgccgaagatcgtagctgcgccggtggaaacgcccataaccgggtcaaaatcctcttccggcagtcttgcaaagttgagctgtgccatcttaatcatgcgggcaagctcgcgggtggtaatggagatatcaacgtccggcacaccggctgcgtcttcgtcgtcacggttgatctcgaatttcttcgcgacgcacggcatgacggaaacagaaacgatgttgttcggatcgatgccttctctttccgcaaaccacgttttgatgagcgcaccagtcatctgctgcggggacttgcaggtggagaggttttctgtgaggctcgggaagtagtgctcgcagaacttgacccagcccggagagcaggaggtgatgatcggcagcttgccgccgttcttcacgcggtcaatgaactcgtttgcttcttccatgatggtcatatcggcaccgaaatcggtatcgtagaccttatcgaagccaaggcggcgcagggctgcgaccatcttgccttctacgttcgtgccgatcggcataccgaactcttcgccgagcgctgcgcgcacagccggagccgtctgcacgacaacgaccttttccggatcgttgatggcatcgatgacctgctgggtattgtccttttcggtgagggcacctgtcgggcaggctacgatacactggccgcaggaaacgcaggccacttcgctgagcggcatctcaaatgcgcagccgatctcggtatcgaaaccgcggttgttcgcgccgatgacggcgacgtgctgctgctggcaggctgccacgcagcggcggcacaggatgcactttgcattatctctttcgaggtacagggtgctgtaatcctttttgccggcgggaacggcgccttcgtagcggttctcgctgtcgatacccatatcgttgcagagcttctgcagctcgcaggtgccgcttctcttgcaggagagacatttgcggtcatgcacggagagcaagagctccagtgtcatttttctggatttctgaaccttcggcgtattggtgaagacctccatgccctcgtttaccgggtacacgcaggcggcaacaagcgattttgcgcccttaacttcgaccatgcacatacggcatgcgccgatctggttgacgtccttcaagaagcaaagggtgggaatgtcgattccggcttctcttgcggcttcgaggatcgtgctgccggcagcgacctcgtaggacatgccgttgatcttaatatttaccatatccatgctattctcaacttccttccttacttcttttcgatggcgccgaacttgcacttttcacggcagacgccgcacttgatgcacttctgcgtatcgatgacatgcggctcgcggacggtgccggagatagcgccgaccgggcagttgcgtgcgcagagcgtgcagcccttgcacttgtccgcatcgatgacgtaattcgtgagggccttgcaggcgcctgccgggcaacgatgctcggtgacgtgcgcaatgtactcatcacggtaatacttgagtgtggaaagaaccgggttcggcgctgtctggccgagaccgcagagggagttttccttaatgtagtagcagagctcttcgagcttatcgatgtcttcgagcgttcccttgccgcttgtaatcttgttgaggatctcaagcaggcgcttcgtgccgacacggcacggggtgcacttgccgcaggattcatcgaccgtgaactcaaggaagaactttgcaatatcgaccatgcaggtcgtttcatccataacgatgaggccgccggagcccatcatggagccgatggcgatgaggctgtcgtaatcgataggtgtatcgatgagggacgccgggatgcagccgccggaagggccgccggtctgtgcagctttgaacttgtggccgcccgggatgccgccgccgatttcttcaacaacttcacgcagggtggtacccatcggaacctcaacaaggccggtattgttaatcttaccgccgagtgcgaacactttggtacctgcgctcttctctgtgccaatgctgcggaaccactgcggtcccttgaggaagatttgcgggatgttggcatacgtctcaacgttattcagaacggtcggcttctggaacagacctctgagtgccgggaacggcgggcggcatctcggctcgccgcgcttgccttcgatggaggtcatgagcgcggtctcttcgccgcacacgaatgcgccggcgccgaggcggatctcaaggtcgaaatcaaagccggaatcgaagatatttttgccaagcaggccatactctctcgcctggttgatggcaatctggagacggtgaaccgcgatggggtactctgcacggatgtagatgtagccctgcgttgcgccgatggcgtaaccggcgatagtcatggcttcgatgacgctgtgcgggtcgccttccagaatggaacggtccatgaatgcgcccgggtcgccctcgtcggcgttacaacatacatatttctgatcggcatcgtttgccgctgcgaatttccacttaagaccggtggggaagcctgcaccgccacgaccgcggaggccggaatcgagcatggtctgaatgacctgctggggcggaatcttttccgtgagaatcttgccgattgcctgatagccgtcgagcgcgatgtactcgtcgatctgctccgggttgatcacgccgcagttgcgcagtgcaacacgcatctgctttgcgtagaacgtggtctcgttaagggattttgtagtgctttcgtcaacgaccgtctctttgtagagcaggcggcgaacgatacgtcccttgagcaggtgctcttcaacaatttccgggacatcttccggggtgacgcggctatagaacgcgccctccgggtatacgatcatgatcgggccgagtgcgcacaggccgaagcagccggtacgaacaacgttgacttcctgatccagacctttggcgctgatttcctccttcagcttttcaatgatcttttcgctgttcgaggacgtgcagcccgtaccgccgcagaccagaacattggaacgaaacatagttttacctccttatttctgatttgcaccgatggtgtattccgtgacgacattgccgttgacgatgtgatcgttgacaacgcgcagtgccttttccggtgtcatttttacgtatgtagtcttggtgccgttttcatcgataacttcgacgatcggctcgaactggcagatgccgatgcagcccgtctgcgtgaccaggacgtcgtgaagctcgcgtttattgacctcatccgagatggtggtgagaaccggtcttgcgcctgctgcgatgccgcaggtagccatgccgaccagaacacgtgttttcgcttcggaattttcgcggacgttgaccgccatttttgctctatctcgaattgcctgaagttcagctaatgatttcatgtggcttttcctttctgcgccttgcgcattgatactacgagagctacttaagctcttcctccgcctctgcaagatactcccgaatccacgccgataccgcgggctccgtaaacggaacgccctccagctgctcgcgcagcgtacgggtatcgagggtgatctctttttcttcaacgctgtgggtaaagagaaaatcgagttcgggattgcaggtgatcaaaagatggataacggacgcgatgtccccgagggggatcatatcgacatgcgagggacgaaacacagccgtgactttggtgcccttcccctcttcggaatcaatctgaaacgagccgcccgtcatttccgcttccattttgaaaagcggcacgccaagcccaaccttgcgggtggtgcgtgtggtgaaaaacggatcgatgacgcttttgacttgctccgcactcataccgcagccgttatccgttatcgtgatggttaaggtgtcgtgctttttcgattccgcgacctgcaccgtgataagcgatgcgcccgcgcgaacggagttctgcacaatgtccatcacattcagcgaaagctcgcgcatggcttacgctgtgtattttgcaagaatcttatccacgtcctcgggaacgagacggccgtaaacgtcttcgttgacggtgaggaccggtgcaaggccgcaggcgccgatgcagcgacatgcggtgagcgagaacacgccgtccggcgtacattcctccggctggatgccgagctttgcaacgagacggtcgagaaccttatctgcacccttaacgtagcatgcggtgccgaggcaaatggaaatgttgtacttacccttcggagtgagcgagaactgagaatagaacgtggaaacgccgtagacctcttcgagagatacatcgagaccgcgtgcaatctccttctgcacttcgatcggcaggtaaccgtagatatcctgcgccttgtgcagtgcagccatgacggcgcccttttcattcttgaggctctcgatgactgcgaggagcttctcatgctgctcgggagtatcggtaaacggaatggtactgatacgcttttgcattttatttcctccctgataaaattaagtttaaattcaggtatggttcggtctgcgcccctattgggcggagagctttcatacatctttatgaattatatcaaaatcgatatacgtaataattctaaaaaagaattaaaaacgaaagtttgtcaaacccatgacgaaatttttgtcagttcttttagcgtacagcacaaaaatttcgttttcgggcatttgttaaagtatacaaaaacagtatagatttgccgtgaaaaggttgaaatatcacccattttatcgatattttatatcgataaaagtatatctattccgttttctcccgattcgcacgagttagaaacagctaattttcaaaagagcgagatttaacgaaattttatgcaatttaacgaaaattcggcaatttggccatattggtaaaaatgacgaaagctgtgcgttatgcgaaattcgcatagcacacagcttggcgtttttttccttataaagtttgaaatttacctgcaccgcacccacgcagcacatctaaaagcgctttggcggttttttccggcagctccaccgtttggtgttcttcgggcatcaaatgcaggtaatgcgcgtcagagctgcgcagaagcatcatgctttcgagctccgggtgcagaagccgctgctgtgcggcatcggcagtaagggacagctctgctgcggaaaactgcgcttccggcgggatagcaccgagcgacgcagtgacgctgtacgcgtctttatcgacatgcgcgggaaacgccacgccgttaaactttttcacaagcgcctgcacgtcgttgatgctgatgtctgttgcggtaatgagaagctcggaaatttcgccgatcttctcgtcgtcctcatttaagatccactgctcgccgaaaatttccgggcggttcggcacctttggaatgtgcgcacagacgtatttatcgaacgcgagcgcgtcctcgaccgtttcaaacagacagacgacatgtgcttcttcggcggtgcagagttccataccgggaatgacgagcacgcctgtggcctgccccacctttaccgcggcgggcgtattgcggcaggtattgtgatccgtaagcgcgatgatgtcgcagccgagcagcgccgccatattgacgaggttgttcggcgtcatgtccgtatcgccgcacggagaaaggcacgagtgcaggtgcaagtcgtaccgatagctgttcatacattcaccccagtaatgaagcgattttgagcgcggtttcaaaggcaggcagggatgtgccgtacacggcgatttcctgctgctcggcacgcgctttggcatctgcatccaaaacggcatcttctacaaggatgatgcctgcggtatcggcaagcgatgcgaccgcgatggcgttgacgttgcccatgacggtaagccacgcgtcgtccgctttggctctgcccatgacccagcttaaaagatcgccgcagtagcagccctttacttcgcgcgttgtatctgtattttcggtcaaaagcttccagccgagtgtttcggccatttcccctatctgcattttacttccccctattcgtcatcacttgtgcgtttgccgccgtcaaggtctaaatttgagagcgaatccgcaaaacggcggatctccttgcgcaggatgaacacgcagtcttccttgcggcagcttccgcgcacggtgtcctccgcaaaggcacggcagctcggtgcgccgcacgcgccgcaatcaagccccggcagctccgcttccaccttgtcgatctccatcatcatttccatggcgcgggaaatatcctccgaaagcgttaaaacattggaaaactccagcccgctgccccagttcatttcctccgggacggttttgtttttctccaagtgattctgcgagacgggcagatatttgcgcaatctttgcaatcttgcaatggcgacatacggattttcgacgcatagcacgccgccgacgcagccgccggagcaggcgttgagctcgatgaaatccagctcgccgatgcgttcgtcttcaatctcctccaaaacgcggatgacgttttcgatgccgtccgccgcgagatatttttcttttaacagcgccgaggattcgccgccggaggtcgcccagctgacaccgataatgccggaatttgagagcgattcgagatcttttggcgtgagcttatccatgcggcttgaaagctgcgggaaaatttcgctgatggcgatagcgccgtctacctccgacttttcgatgccgatgggcatgcgaatatccgtaacctttgcgggacacggcgtgatgaaaaagcagccgatctgctctttcggcaggcccgttttctgcatggcctgctgctttgcaatccttgccgcagtctccatgggtgacaaaagcggcagaacgtggtcgcagagatccgggaagcggacgcggattaaacgcacgacagccgggcaagccgagctgatgacggggcgctgcaaggtgccggcatccatcaggcggcgggtagcctcgctgacaagctctgccgcgccggaaacctccatgacgtcatcgaacccaagctttttaaggccggataaaacataatcctggtcgtccaaattattaaactgcccataaagagacggtgcgggcagcgcgattttatatgtaaacttttccagcatggaaaggtggtcatgctttgcacgctttgcgtggtgcgggcagatgcggatgcactctccgcaatcgatacagcgctcgctcatgatgaccgctttgccgctgcgcacgcgaatggcttccgttgggcaacgcttgatgcagtttgtgcagcctacgcacttgctttcatcgagcgtgaccgagtggaaaaaaatacccaatctaacgcgcctcctccattatcctatgcagagcttacgatttttcgctctgcgcgtaaacgaccattttgagcgtggtgccctgccccacgaccgaatcaatcgtcatttcgtcggaatacttcttcatgttcggcaggcccatgccggcgccaaaaccaagcgaccgcacgttatccggcgcggtggaccagccctcctgcatggccttttccacgtctgcgatgccgggaccgtggtcggtgagcacgatgacaaccttatccgggtccacgtccacattggcttcgccgccgcccgcatggataaccatgttgatttcaccctcgtacatggcgatggaaacgcggcgaatggcagatgggttatagccgagtttctttaatttatgctttacatcgcccgaagcttcgcctgcgcgggtaaaatcatcgccggggactgaataccgaagttgcagcatactcatgatacgtcacacccgccttctaatcctttttcgtataggaggccgcacgccgtgaacattctgtacggcgttgcgagaatggtgatgtccttttgccgtgcgagcgacaacacggtctcatccgggcgcttgccgcgcacaaagatgatgcagtgcatatccatcatttccgccgtgcgtaccacctgcggattgacaaggcccgtgagcagcacggactgatccttgacaaacgccagcacatcgctcatcatatcgctgccgcatgcggttttgacctcttcctgaaggtcgccctccgccagtatttccgcctttaaaatgttgacaatattctgtaccttcatgaaagcttcaccctttcgccgagttcggacacgggtctgtttgctctttttgagcctaaagtgtccttgtattctgttattatacaaaaagatttccaaaaaatcaatccgttatggaaaatgttctgtacttttagatagtttttaaagtgtttttttgccgcgttttttgccttgcggtcgaaaaatgcagatttgtcaacagaaggtggacaatttatttgtatttgtgcatggggcacgaacgaaatgcagcattcgatatttgtccaccgattagatacacctgtttttattccgaaaacaaatttatacttgacatttgcgttttgctgtatgtataataggggaaactttaccgcagtgctataagaaatcacggtaaagcaaggcaaatctattttattatccggtgcgatttaacgcgccaaagaaaggaagatcttactatgaaccgtgtgtacaacttctctgccggcccctctatgctgccggaaagcgttcttctgagagccgctgccgaaatgctcgactatgaaggatcaggccagtccgtgatggagatgtcacaccgatctaaggtctatgacgcgatcatcaaaggcgcggaaagccttctgcgcgaggtgatggaaatcccggataactacaaggtgctctttttgcagggcggcgcatcctcgcagtttgcgatggtgccgctgaatttgatgacgaaaaaccgcaaggccgactatgtactctccggccagttctccacaaaagcgtataaggaagccgcgcgatttggcgattgcaaagtggtggcatcctcgaaagagcagaatttcagccgcattcccgaccttgacccgaaggagttccgcccggacgcggattacttccatatctgcatgaacaacacgatctacggcacggtattccatgcgctgccggagacgggtgacgtgccgcttgtggcagacatttcctcctgcattttaagccgcccgatcgatgtttcgagattcggcgttttgtatgcgggcgcgcaaaaaaatgtagccccggcaggcctgaccattgtcatcatccgcgaggatctcatcggcgagccgcaggaaaaaacgccgacgatgttcatgtataagacgcacgcggaaagcgacagcatgtacaacacgccgccgtgttactccatttacatgtgcaagctcgttttggaatggctgaaaaacgaagtaggcgggctgaaggcgatggaaaagcgcaacgtggaaaaggccgcgctgctctatgatttcctcgaccgctcaaaactttttaagggctgcgccgaaaaagaaagccgttccattatgaacgtgacattcgtgacgggcgacaaggatttagacgcaaaattcgtgcaggaagctgccgctgcgggctttgtgaatctgaagggccaccgcagcgtgggcggcatgcgcgcgtctatctataacgcgatgccgcgcgagggcgtggagaagcttgttcagtttatggagaactttgaaaaggagaatgcctgatgcacaacatactttgcctcaataagatcagcccgctcggcaccgaccgtttgggcgaaaactatacatacgctgccgaaattgagaacccggagggcattttagtgcgctccgccgccatgcacgacatggaattacccaatagcctgcttgcaatcgcgagggcaggcgcgggcgtgaacaacattcccgtggaaaagtgcgcggaagccggcattgtggtattcaacacacccggcgcaaacgccaacgccgtgaaggagctggtgctggcggcactgctgttgacgtcgagaaaaattgtcccggcgattgaatgggcgcagacactaaaaggcacggcagacatttcgaagcaggtggaaaaaggaaaatccgcgtttgcagggccggaaattctcggcaaaaagctgggcgtgattggtcttggcgcgatcggcgtgctcgttgcgaacgccgcacagacgctcggcatgcaggtatacggcttcgacccgttcctttccgtggacgctgcatggaacctttcgagcgacattgtgaaggccgcttccgtggatgagatttttgaaaagtgcgattacattacaatacatgtaccgctgaatgactcgacgcgcggactcataggcgcggacgctttgaaaaaagtgaaaaaaggtgtgcgcgtcttaaacttctcgcgcggggcgctcgtcgataccgacgcgatgttggcggcgcttgcagacggcaccgttgccgcgtatgcgacggacttcccggatgacgcgctgttcggggtcgaaaacgtcatcgcgatcccgcaccttggcgcttccacgccggaaagcgaggataactgcgctgtgatggccgcagaggagctgaaggattacattgaaaacggcaacatccgaaatgccgtcaacttcccgtatatttccatggcgcgcggcgcggacacacgcatttgccttgcgcacagaaacattccaaataccatcggttcgttcacacaggtgtgcggtgaagcgggcatcaacattgagaacatgctctcgaaatcgcgtggcgactgggcatacaccattttggacgttacgggcgacgtgacggaggacgtgcgcgaaaagctggcggcactttcgccggttgtaagggcaagagtaataaagtaagctcttacttcaccattcgcgggcaggagaccgaaaaaagatagaggatatcgtgacaaggcacgaaccggtcgttttaagccgagccaaaagcgcgacctttatttctgtgattttgcaaaacaacaaaaacacggtgcagcttcatttcggctgcaccgtgttttttgagtttacggataatgctgttcagtcttgctcctgcacggcgctgcccaacaagagggcggcgatacactgcacgatttctttgtcgctggcatcttcggggatggcactccaaaacgcgcgggctgcggcatttgaagaatttttcgccgtgcgaagggctttgccaatctcctcgcggaccgtttcaccgtctacgccgtgtttggctgctacgcgcagcatcaattcctgttcactcaaaatctctcatccttcctgatccggcccggcagccccgctgtacttttagagcggaggctgtcggatgggtggtaaatctgtcagtaatgccattatagcaagggggtcttgaaagttcaaatagaatcgttcgcgcgttttcgacggaaattgacaggttccttttcaccctgacaaaaggtgtgcggttttttgcgaaaaagccgaaattgttacgaaaagttcatattttgacgcacagtaaagcgagagaaaatcgggaaaatcaggtatcggaggtgttgcccggcatctgcggaggcgtgccgccgttaccgttcggcggggttatgccactatcgccgctcggcatttccggcggggtggtgccatcactgttgccgttcggcatttggccgcccataccgccgtttggagcctgaccacccatattaccggggccgccgccaaagttgcccatacccgtagcgccgctgacaacgccggagcaggtctcgctcgcggcttctgtaccgtttacatagactgtatacgtttcgccctcggtgatgtccggcgtgctgaacgtgacattcgtaaagctcttcggagccacggcggaaacgagcgtgttgccgtccgcgcccttcacttctacggtgtcacccgcgctgccggtgcagctgacgctgatcgtgttctgtttggaatccgttgtgggggtcttcagcatgccggagctgcctgtgccgagcacaacgccgccgttgatggtaaacacgccgtcgcagtcaaatgtgccgttaccgtcaccggtggggccgctgacgtacaccgtaccgccgttaatcgtaagcgcaccgttggaatcgagcccgtcgccggaggcgtttacggtgagcgtgccgccgttgacggtgatcgtatctgcacccgcggtgccaaagccgccgtcaacggagctgcctgcagcattcagaccgtcgtcgcttgcggtgacatcgatcgtaccgccgttgatggtgaggtcgatggcttcaaggccctcgcaggactcttccaccacgatggtgccgtcctcgattgtaagggtgttatctgcgtgcaggccgtcgtcgccggactttacggtgataccgccgcctgaaacggtcatcgaatcgttgctgtgcaggctgtcgtctgcggaatcgaccgtgacggtgccgccggtgatgtcgagcgcggcttcggccttgatgccctttgtagacagggtttcgtccgccgttgtattctgtgcgccgccaaacatagcattgcccgttttttgctctccattcgcgctgccgccgcctgcggtgacatttacttcgcccgcggaaatgagaacaccggtctccgcctgaatgccgtcctgctcggcggtgatgttcacagtgcccccgccgatatagacatagcctttatcggcctcggatttggtggacttgatgccgttgccggaagccgtgatatggacggtgccgtccttaatgagcacagcgtctttgccgatgaggccgtcgtccgccgaagtgatattcaaaacgccgccggtgattttcaatttatcttcgctcgtgatgccgtcatttgcattggagttgacgttcagcacgcccgtgccgttaacggaaaggtcgcatttggcgaaaaccgcggcggtaagctcatcgtcgccgtccgtaccggtgatagtatcggtcacggtgctttcggtgttttcgggcaggctgataatgactttatcggcgtttttcgcgtagataggcgcagtcgttgtgcaggtgatgctcgcgttttcgagcacaaggcgcacatcatcctcgtcgccggcatcaatgatgacctggccgtccgtgagcgtgccgctgagaacatacatgcccgcttccgtaatggtgaccgtgctgccggaaaccttaacgccgtctgcttcctttggcgcggaaaggtcgatcttcacggtgtcttccgtactgtaatcgatgtagaaatccttatttttgaaggaaagatttgcttcgatgacggagccgatggtaccgttcatcgcgccgccggtagaatcggtctcgtctgcaccgctttcctcagaggtgctggccgtgctcacggtagaggaagcggaagatacggacgtagacgatgtggtcgactgtgtggaggcacaacccgctaagatcagtgcggagagaatgacagcaaagcgcagggtgtgttttttcgtggataaacgattcggtttcataaaggaaggctcctttctttacagttgttccacgggagtatgcggctggccgcagcgtacttcgagattgccgttgcggcagcgaagcgcatcgagaaattctttttcgttacggtcgtccgcaaggcgcacgcgatagtgcagcttatagaggctaccgaggcttgcggtcttgacttccgtaagctctgcgtgggtggtgtattctttgaaaatatcgtcgaacacctcggtgtaatcgagcgattcagggatggtgatgctaagctctttttcgccgctgcggtctgcaccgatatggaagaaaacgagcagatacagcacggcgcacgcaatgaccgtgaagagcacggagagcgcaatatagccgctgccgcaggcgagacccacggccatggcaacgaagatgacggagatgtctttggcgttaccgggtgcggagcggaaacggacaaggccgaacgcgccggcgaccgcaacgcccgtgccgacgttgccgttgacgagcataatgacggtctgcacggcaaacggcagtaaaatgacggcgagcacaaggctttgcgtaaagcgcgtgcggcgcgtatacgtaaacgcgatgagcgcgccgcaaagcagcgcaacgagagagcaaatcaaaaacgaagatacggtgataccggacgaggtgaggcttgcaaacatggtttccatgggaatatcctttctgaaatcaaatgaattatttaggatgcatgcacgatgtgcgtgccgtgggtgttataggcactggcatatttagaaaacgacgcggggtaaattctaaagcggctcagcatatcggtgagccatgtggggagaccgccgccggctttgatttccatcagcgtttcgccgggctctaaaagcagttgcccatcgtccccctgacgcaggtcggtattttcttctctaaagcgtatgttggtatcgaatgtgatgcgcaggccgctgtcttcgcggctgtaaagtgccacgcggtcatagcacagcgccatggcggactttaaatcgccgtaatagtgcagtgaccacgcaatctcttttgcaatctggctgttctctttcggcgctttgccgtttacaagccagtcatacgcttcgccgtagggcatcacgatgcggcgcttgtagacaatgccctgatattttttcttcagctccacaaacgacgggctttccgctttcggcacgccgtaggtacgcaaacgcagcttttctttatagacgggcttttcgcccgaaagtcgcgccagcaaatgattcggggtgtcaaagtaaatgttgcatatggtggagcgcccgtattcatcggggcgcatatacggctccaaaaccgcccagagcgcctcaaactgtaaggaatcgagcagatatttttgctctacgcgctcaaatatgccggtatagtccgccatggctttcgccctcctctttgttttgtttcttaaattttacttacaaaatgtgatgaaaaggtgattacattttgagcgttagcggagaaaaccgtgcaaaagcaggtgctgtgcaccgttcctacaaaaacaggtgtgttctgctgtgcaaaaagtccattgcgccgcacatatacaaatgatagaatgagataaacgcgtttctatggaaaaacgcaactttgggaggatctgtatgtacacactcgattatttaaattgctttattgaaaaccttgatctgccggaagcgagccgcgcttctctgcgcgagaactgcgagacgctcgtgacgacacccggcgcgattgacgagctggtctctgccgagacgctgctctttaaagattacggcattgacggcgcatacggcgcggaatggaagcccattgtgccgcacatggacgcgctttcggagcggacagggctgcaccgccacgtggtggatttcctgttccttgcgcttgcaagcgaacgtctgcgcgaaaattacagagcggcgggcctgacggacgagctgttctgggacaccatcgccgacctgaaattcaagctcatcgagtgccacgacgtatacgacatttggggcacattcgtcgcaagctggtacccgtggttctacacgatgcaccgctttaagctgggccgtttgcagtatgaggccgtacacttctccggcgacacgctcgtgacggtcggcggttacacggtaaatcccggtgacacggtttacaacatgcacattccgtcctgcggttctttgaaccgcgcggcgcgcatcgaatcttataaaaaagcctacgaattttacaaaaaagacctcgatggcaagccgatggtattctgctgccactcctggcttttgttcccgaagaaccgcgaaattctgcccgagacgctcaatacggtcgatttcatcggtgacttctatatttacgacagcgaggaatacgatgtgttccacgacaagtggcgtgtgttcgcaaaggactttgagaagccgaacagcgagctgccggaggacaccacccagcgccgctgttttaaaaaatggcttctggacggcaaaaagaccggcgcgggcgcgggcatctttatttacgacggcaaggaattcatcaaataagtaaatttgcaggatattttgcaaaagcctgcattgttatgcgcaaaaaggcttgacagaagtttaattagctgatataattttgaattgctgatcggtcatataaattcacgacttgggtgaatgtctctaccggccgccttgtgtgccgactataccgaagccgcttacgggcttcgtgtatacgttcgggcacagggcggcctttttatgtgccgatttacccgaaaccgggtcttgcatagagttgtattttgaaattcatacgcaaattcatctgttagttttagaaagttgggatcaaacatgaacacggatatcgtcatcatcggcgccggtcctgccggcatttttaccgcgatggagcttctgcgccgcggcagcaaggagaaaattctgctgctggaaaaaggccgttccattgaaacgcgcaaatgtcccaaggcccagaccggccgctgcatgaactgcaagccgtactgccatattacaacaggcttttccggcgcgggcgcgttttcggacggcaagctgtccctcagcccggaggttggcggcgacctgcctcagctgatcggcgaagacaccgtacagtcgcttattgaatacacggattccatctatctggagttcggcgcggacacgcgcgtggagggcgtgagcgaaaaggaagccgtcaaagaaattcgcaagcgtgccatccagaccggcctgaagcttgtcgactgccccatccgtcacctcggcacagagaaggcgcaggagatttattacgcgattgagcaatatcttctgaataacggcgtggagattcgcttcggctgcgcgtgcagcgacctcattttgaagaacgacacctgcatcggcgtgcacgttgcggagggtcagaacgaatacgacgtttacgcgaagcagaccgttgtggcagccggccgacgcggcgcggattggtttgacaagctctgcgcccgccacggcatcgcccatgcgccgggcacagtggacatcggcgtgcgcgtagaggtgcgcaacgaggtcatggaaaccgtaaacaacgttctgtatgaatcgaagctcatcggctatccgaagccgtttaaaaacaaggtgcgcacattctgccagaacccgggcggctttgtcagccaggaaaattacgataacaatctcgccgtcgtgaacggccattcctataaagataaaaaatccgataacacgaacctcgccattttgtgctcccacaacttcaacgagccgttcaatcagccgatcgaatacgcgcagaaggtgggcgagctgacgaacatgctgggcgcgggacacattttggtgcagcgctacggcgatattctggacggcaagcgcacgtggcagaaagagctttctcgctcgaacctgcgcccctctctgccggacgcggtagcaggtgacatcacctctgccatgccgtaccgcgctatggtaaacatcatcaacttcattcaggcggtcgatcacgtcgtcccgggcttcgccgccgtggagacgctgctctattcgccggagctgaagttttacagcaaccgcgtgaagatggacacggacctcaacacaagcattcacaacctgcactgccttggcgacgccagcggatggacgcgcggcctgatgatggcctcttgcatgggcgtgctcatgggcagaaaactcgcagaacaggaaaacgcataagagaacaagattgcacacatcgcaagttcacacataaaggaacgggccccgccgcggcaattcggcagaagcccgttttctttttgggcttagggaaaaagcagaagaattttcttgcaggcgcagggggaatatgctatactgattatgtatgagtttacatcatgactacattcaaagaaagatggttttatagatgaaattaggtatcggagtcccctacctaagttttcatatttccattttcccttataaatgccgataaaactagatttcatgcgctttttcagaatacccaaaagcataaaaacgtatatatctcaatgccatcccacgcagaaatggcgtaaaaatggcgtagtagatttttgacggtacagctgcgaaaagaatacacactacaaaaaaacaatcacacccggagatgggagctaacccctcatctccgggtgttttctttattggatattaatgttcttgggaggtctgtcgaatgatcgcggatgtcggaagcgccttattggaaactccccaaggatatttctgagaatcactgcgatcgtactgatatacaataatttccggatcatgatacttactgaatccctgagataagaaaaaagtaaagtcactagaggtcgatagaacgagatgtattttctcgatatttgcagatgatacaatttcacgcattttattaagtattccagtcctcaatctattcataagagcataagaaacaattgctgcaaacgtgtcattatgcgttttatatcccaccctgaacgctgtttatcacaaccaccttgaattcatcccaaatttagataaaatataaacacgaaacaaggaggcgcgcgaatgatcacagcagaacatttaagccgaagcttttcgggtaacggtctcaagttacgggatttgaactttcatattgaaaaaggagattgtgttggcttgatcggcccaaatggcagtgggaagcgttcgcttattcggttaattctcggtatctataatccggaccatgggagactgtgggtcatggggaagaatccgagtcttatttgccgtacaccgctgcagatgagccgtatcgaccggaaccgtatgacgttcattcttcccgaatctttacctgatgaacgcgtgtctggaatcgtatctccaaagaaaaacgcaattttcgatgcagatgattttctgaaggagtgttttgaaacattaaagctttctgcgttgctttcatcaaaggtacatcagctgtctcgcggcgaactcgcacgcgttcgcttttatgaagcaatcacttctatgcccgaactgcttttactgtacgagccatttgtcggtgtggacgcctcaatgaaggaacagatgattcggattttactgacaatgaaccagaagtattcaactacaatcctattagcggtgcaaaatctgaatgatatggataaaatttgcactcgagctatcgtgttagataagggaatatgtatatattcaggagacttatctgatctgcgtcatcgctatttactgtcgaatcggttggttttccaaattctcgatggagttcccgactttcaggatcttccaatacaacgattcagttggaatgatggagatttgaaaatcactttcgatcctgaatcagttcgggcagcggacattattgatcatgtcctgcacacctgcaacgcgtctgaaatacttattcacgaaccgcaggtcgaagatttatttcgcatattatattcaagcaaaaaggaggatatgttatgaatagtattgtgttatggttcgatttggcacgacgatcatttcgatcacaatcggtctatcgcatcaatgtattagtcaatctgatttacagtttcatgtcagtacttatcaatgtatccgtttggaatgcgctctatgcgcaaaacgtcgaccctgcagcaacactttcagaggcaattacatacagtgtgatctcctcaacatttttggtgggaatgcagctttggcccggtgtccgcattggtgatgccgtttattctggagaggttggccagcagatggttcgtcccatgaacctgctcgcacagcatgcggcaatggaattaggagagaaaatgtttaatttcttcacatgcattcttccctgcattgtagctgcaaaaattgtatacaatgcactcttgtttcccgccacactcgcggacgttttattttttctattgagtgctcttctcggaaatatgatctttttacttctcaacacaatattgggctatacggctttctggcttggaaatgtttggtatatccaatggtttttgacagcagcaatgtatgtttttggaggagaaatggttcctttttggtttttgccggacaagttgaatatcattacatggtttatgccgttccgctgtgttctgtttataccgatggaaatgtatttagggcgtctgtctatgaatcaaatcattttcaatctttgtttacaagtactgtggctcctcggtttgttgcttttggaacgctttgtgtggtatcgggcacaaaagaaaatcgtagttcagggcggttgactagaaaggaggtccgtaatgttctatctattcttggcaaaacaatttattcgcacacagtggcggtctcaaaacgagtatcgcttttcattcattatgggtatcttggctcaaggtacaaactttgtgtttcggtatctggctttgtatcttttggtttcaaggtttggatctctcaacggatggaattctcgagaattacttctgatctattctttctcacaattcacatacgcaatcggttcaacatttacacatgacctttgcagacagcttccgaatcttgcccgcactggtgacctgaacagttatctgattcgaccggtacactcacttttccttgcaatattcacgaatttcaatgttggatatattacgcactttacaatatctgccactgtaatgattttcagctttatttctctcggtgttacactaaatctttggggcatactttggctagttatcacattggtatcgggcggcattatctccggatgcgtctttttgatttcctcgcttccaagtgttgtagccattggcaatgtttctcttaagaacattacatatgttttcaaggatgttgttcagtatccgctttctattttcggcacacctttgcaaatcattctgaccgttttcatacctcttggattcacgacgttttatccactgcagcctttacttggaaaacaggacatgggtatttttccagtgtttatccaatatttgtctcctctcgttgcaattgtgatggtactcttactactcctcgcttggaggacagtcattaataaatacgaaagcaccggaacataagaaaggggtttattatggcttatatagaattacatgatgttgttaaggatttcaaaatcaaaaatagacgcaatggcgcttttggaaatgtgaaaaacttttttgcaccgcagtatctaacgaaacgcgcggtagaccatatctctctggaaattaatcgaggtgaaatggtcggatatatcggtccgaatggagcgggcaaatctacgacaatcaaaatactcacgggtattctgttgcccaccagcggctatgtaaaagttggtaatcttgagccgtacaaaaatcgaaagcagaacgccttacatatgggtgcagtctttggacagcgctctcagctcctgtgggatctgccggtacaagatgcactggacttgtttcgtgggatgtaccggattgaagaaaagacctacaagaaaaatgtagagatgttctgcgatttgcttggactcgatcaattccttatgcaacctgcgcgtcagctgagtttaggacagaaaatgcgcgcaaatctggcactcgcattaatacatgatcctgatgtagtttatttggatgaacctacaattggtcttgatgtcctcgcaaaggataatatccgcgcgtttctgcgggaaatcaacaaagagaaaaacacgacggtactgttgacaacacacgatatgacagatatcgagagtgtatgcgaccgtttagttctgatcaatagcggtagtgttctttatgacggcggtctcaacgccttcaaggaacagtactccaaaggctacagtatccgcgtaacttttgccgatccaaaagaagcgattcaggatactagatttgaattgattgaaaagaaagacgcagagtcgatataccatgtttctcagtcggattttcagcccggagaggcacttgcttttctggcaagtcactgcaaaatgcaggatatcagtattattgaaacacctatcgaggaaattgttaaagcaatatacaaacacgaagcataacaagaagacaagagtgaactgtaaaaatacggttcattcttgtcttttttattaataatcatttttttgactgctgtctcagcctgccggcagcataacgttcacacagaaaacaaggtcttcttcataaatatccagcaaaccattgtatttttctataatggctcgaatctgctttattcccatgccatgtttttccggttccgcatgtgtagaatgcagatccgggttaactgccaaaacagaggaattgatactgtttcgtaccgaaatagcttcatatccgcgctttttactgatggatacggaaatttgccgcttatccgagtttgctgcggcgtggatagcattgtcgagtagattggttaatagagaagagaagtcgacactatcaattttttggaatttaaggttctctatctgcagctgcatatgtacctgcatctgctgggcttgctgcagttttaaattcagaatgtaattcaatagcgcatttccactgtcaatataagagtactccagattaagcttgtccaaaatctgtgcagtgtaagtacgagcttcatcatacttttcatttcctaaagacatagcgatgaccataagatggttgcgcatatcatgctttaagcgacgcgtattttcatggatagaacgcacattttcttctgtagcacgcattttttccaaagcttcatcggctgtagctaccttctcgcgtagctgaatcgtttcgtccagcaaagctttataatctgcgttcagtcgtataaattcctgttctagtactttctttcgcatagaataacctctttagcggaacgaccgcatgatttgctgcttggcattctctgcccaagcgcgcccaatggggagctctgttccgttttccagcgttatgctgaccgtgtgcagcaggtgcacagcggagcaatttaccagaaagcctttgtgtatacgtacgaatccgtgagaatcaaactgttcctgcatttcacgcatggtggaacgacaggaataacaatctgccgcagtatatatttttacgtaatttccattagcttcgagatgtgtgatgtcagagaacgggagtcggacggaaacgctgccagaacgaaatgtaaaggcatcgatccttgcggatacttcgtgtgcagcacggagtagtacacgttcgagatcctcatgataacggcttttacgaacaaaatcaaatggtttgtactgaaatgtttcgtatacaagagattcctgattcgtaataaagatcaaaagagctcgattgttccgctgcagcaattctccggcaatatcaaatccggtaagacgcggcatatcaatgtccagtaatatgagttccggcgcaaatgcttcgagctcatctataaagcagttaggatcactggataccagccacgttggagagataccggcacgcttatagcaagcagtacagaacttctgcagttcatcaagaattatgggttcgtcatcacacattgcaattctcatatggcatctccttttctagtgatatgaattaattataacttattaaccccgaagtgtccagcagaagcttctgaaaaccaaacgcgaggatattggtggaaaggaatgaactatcgcaacgagtaaggttaattccatacgtaatcgccatagaaaatcagctactttctaccgctaaaagaactggcaagagtccccctcatcttcctattcccttctctatagatcttctcagccgcttctgcagaagaaaggccaatggttatggcggtctcatagaaggtgggagacttatatttccggttttgcaccctatggcaatccgggcagaccccggtgcgtatacgaatcacttcctgttcctggtaggagagtgcgttgtaagcagagaaaagcgtttctgtcaactccttttggaccagtgtgcgaagcggttcatatgtgtcatctccacaaatctcttcacagctttcttcgccgtcatcgtcggcatactgccggtatgtcggcaccaaaaagctggtaaaacgcaaggagttcgaagaatatatcagtcagagtctgatcatctaacataaatcgctaacgaaagaagaaaagtttcaaattatgccttgagaaaaagagcactttatgctaagattagaatttagtagtgtgctcttttcgctcaggcagaaaggagtaaaactatgggcaaaaacctcaaaggcaaggaatgtggaaaaggtattcatcaaagaaaagacggtctgtacagcgcaagatttgttgaccgattcggaaaacggcacgagaagtattttcagacacttcccgaagcgcgcaactggattgaagacagcaaatacgctgacaaacacgacgatatttttgttcctacagatatgacagtcgatgagtggtttaacttctggatagaaaacattgtgggcgatcttgctcccaatactctcagaaattacagggaaaggtacgaacataatatcaagcccgttatgggtaaaatgcttatctccaatgttaaaccgatgcactgcaagaaggtgcttcttgatatggatgcaaactatgcaggctctaccattcggcagacttatatcgccatgggaaccatgttcaaagcagccaagatgaatgatgtgatcgctaagcaccctatggacggagttcgatattcaaaacctgtgcgtgcgaaagatgacatcaaattcttcacccgtgaggaacaaagcaaatttcttgaagcagcccgaaaatcacacaattacgagcaatacgcgctgattcttgaaaccgaacttcgtaccggtgagctgatcggactgacatgggatgcaatcgattttgagcatcggatgcttacagtaaacaagacactcgaatttcgccatgcgcagcaattctggcgagcgggtcctccgaaaacccagcaaagctatcggacgattcccttgacagacagggcgtacgacatattcaagaaattatgggataacaggcacgagagatatgaatctcctgctttatctgaaactcttgaatatgtggacagacgcacgggcatgatggctaaacttgtgatgcgtgatcttgtcttcatcaactggcgcaccgggcaaccgaacaaaaacagttcttatgatacccacctctacaaactttgcgataaagccggtatcaagcgggtatgtatgcatgctctgcggcacacatacgcaacccgtgcaatcgaaagcggtatgccccctaaaatactgcaaacccttctgggacacgccagcataaaaacaaccatggatagatatgttcatgtaaccgatgaatccatgaatcaggcgatgatccagttccagcaagatgcggtctattaatcagccattcgtaaatggcgtaaaaaatggcgtagacagtaaatcagcaggcagaaaaaaactagtaaaaaaatcggtgcaataccaaaagcgctgatttcggacatttatcagcagtaaaatccccctgaaaacgggggattctgataaaaaccgatatattttaatgcgagaatggcgtaaaaatggcgtaaaatccaaaagccaaatcgcaaaagcccagtaaatccgggaatttttctaaggagaatgataaatatgaaattaggtatcgtcggtctgccgaacgtcggcaagagcacactttttaatgcgatcacgaatgcgggggcgcagtctgcgaactacccgttctgcaccattgagccgaacgtgggcgttgttgccgtgccggacaagcgcctcgataagctggcagaaatgtacgagccggaaaagttcaccccggcgacgatcgagtttgtggacattgcgggtcttgtgaagggcgcgtcgaagggcgagggcctcggcaacaagtttctctccaacatccgcgaggtggacgcagtggttcatgtggtgcgctgcttcgaaaacgacgacattattcacgtcgagggttccatcgacccggcccgcgacattgagacaatcgaccttgagctgattctctccgacattgaggtgcttgaccgccgcattgacaagacgaaaaagatgatcaaggcggacaagaagtaccagagcgagctggagttctttgagcgcgtacacgaggcgctggatgccggcaagcccgcccgcagcgtagcgtgtgacgaggaggaagccgagctgctcgcttccgtcaacctgctgacgaacaagcccatcattttcgccgccaacatgagcgaatccgactttgcaaacggcattgaaaacaaccccggctatctcgccgtgaagaagattgccgacgagcagcacgctgctgtgctgccgatctgcgcggagattgaagccgaaatttccggcatggacccggaggaaaaggagcttttcctcgccgacatgggtctgaccgaatccggccttgaccgcctcatcaacgcgtgctactccctgctcggtctcatctcctacctgaccgccggcaagcccgaggtgcgcgcctggacgattaagaagggcacgaaggccccgcaggctgcgggcaaaattcacagcgatttcgagcgcggcttcatccgtgccgaggtcattgcatttgacgacctgatggcatgcggcaccatggcgaccgcgaaagaaaaaggccttgtacgcagcgaaggcaaggagtatgtaatgcaggacggcgacatcgttctgttccgcttcaacgtttaatcttcaaacaaaaattgcaaagccctccgcttccgatttttcgggatgcggagggctttttgcaggaataaatcttgtaatctttatttgctgtcttcgctgatgatgcggtaatacacctttgcggtgagggcatagacgaccgcatagagcacggagaatacgaggaacgacgcgacggtgcaggtaataaacaccgtttcggagctgagcatcatagcgcgcagaatagcgcggatgatggggtacgcgaacatcacgtggatgccggctgtgatgagcggcaggaagaaaacggtcaaaatctgcgtatggatagagtgctttacttccttttggctgaggccgacctgctgcatgatggcaaagcggttcttatcctccataccttcggaaatctgcttatagtaaatgatgagcacagccgccatggtgaacacaaagccgagcgagatgcccataaagaggaagctgccatacatgctgcgaatttccttcgtgttttcgacacggcactcaaaattgaagtatccgtcttcgtcccagaatacgctttcttcgtccggcatgatggtcgtaacgtcttcgcggatcgcatcgtaaaacgtctgttgttcctcatctctcagtttgccgagcgagatgcagtagtactcggtgggcgtgatgacttgacttttttccgcataatccggcagaacaacgacatacggctttgagacgtaagcgtgatatctgccgcgcaggttaaaggacttcggcgtgggtaaaagcgtatacgtcgtgcccgcaaatgtcatggtgtccggcataggtacgccgtctacactcatataaagcgccgtgcccggttccacggtcacgttttcgcctgtgatgcggttataggtctctgcggaaaagaacagcacgttacgcgtgatggagtcgacctgcgcggtgccgtctttcatgaagattgcagaggaatggtcttcggtttcttctgcggaatcgtagccggtcaggaattcataggacgtatagctgccgcccggaacacttttcagctcatcggtcagaaaggtgtccatgtcgaccatgtggttcgggtcttccatactcaccagaacatctgccgggtagcgtgtgtggatcatatcctcggcgccaaaccacagcgagcaggtggaggacaaaatgacgagcaccatggtggagagaatgcagatatttgcaaggccgacggcgttttgcttcatgcggtacagcatgccggaaacactgatgaagtggcttgttttgtaataataatttttgttgcggcgcaaaagctttaaaagcgcgatgctgcccgccgtgaacaggaaatacgtgccgataatgacgaggaggacggcaacgaaaaacagagagatggcgaggacaggctcacgggaagacagaatggaaagcgcatagccggagccgaggcacagcacgccgagaatggccatgaacgctttcgtcttcggctcgcgctcgccgacgttcgtgccgtgcagaagctctatggggcgcgaaatgcgcacacgaaacacattcgagatataaatcaaaacgtagattacgccgaacacaacagcaacgtactgcaggcttttcgggatgatgtgaaagccgtaattcggcgtgatgcgtatcattttggcaacgatgagaaatgtgagcttatcaagcaaaatgccgacggcgcagccgcctacaataacgataagcgccgtaaaaagcgtttccaacccgatgacgcgggcaatgtggcctttgttcatgccgagcacattatagagaccgagttcttttttacgctgcttcatcaaaaagctgttcgtgtaaaacaaaaatatgacggcaaacagcatgacgacggtgcttccgagcgtgaacatcatttgcgacgtgggaccgagctccgtattattggaaagcgaatttaaaatgtagctgaccgctgccacaaaaacgcccgccagcataaacggcacgtagctgcggcggtgctttttgatgttctgcgccgccaagcgcacatataagttattcattttcgtgccctcccgttacgcgcctgccgccatggcggtgagggtatccgaaatacggtggaacatctcttcatttgtggaaccgccgcggtaaatttggtggaacacaacgccgtccttgatgaacagtacgcggccggcatggcttgcggccttagtggagtgcgtgaccatcaaaatcgtctgaccggcgcggttaatctcgccaaagagcgataaaaggctgtcggacgcgcgggaatcgagtgcgccggtgggttcatccgcaaggagaatctgtggtgaggtgatgagcgcacgcgccactgcggcgcgctgcttctggccgccggaaacctcgtacgggtacttctggagcagatttgcaatgccgagttgctgcgcgagcggcagaagcttcgcctgcatctccggaaaatgcttgcccgccaaaacgagcggcagaaaaatattatcctgcagggtgaaggtatcaagcaggttgaaatcctgaaaaacaaacccgaggttctggcggcggaacgaagcaatctctttttcgccgatggttgagagtgcacggccgtttaagaacacctcaccctccgtgggacggtcaagcgccgccaggatatttaagagcgtcgttttgccggagccggactcgcccatgatggcgacatactcgccgcgctccacggcaaatgtgacattcgtgagcgcctgcacgcggctgccgccgaaccgcgtggtgtatacctttttcaatccattgacttccaaaacagccataaataagtctcctttttcaattcgttgacaaaagtatacagcaaaaagcggacgcagaacatcgatttaccttacaaaatgaaaggcggagcttacatttttgtaaggtcactccacctgtaaattgctttccttcatatcgagcgaaaaggtgctgcctgcgccgggagcggactgcacggaaagcatgtggccgagcatatcggcggcgcggcggctcagatacatgccgagacccgtcgatttcttttctgccctgccgttatagcccgtgaagcccttttcaaaaatgcgcggcaggtcttccggtgcgatgccgatgccggtatcgctgacctttaagaccttattctttgtaacggtaacggtcacggtgccgctttccgtatattttacggcgtttgcgagaagctgacccaaaatgaacgccaaccacttttcgtccgttaagacctgcaccggggcaatatcgcactttaacgcgatgtgcttgcggacaaactgcccggcgtactgccgcacgacgcgctttatgacgggttcgacctcgactttggcgaacacaaggtcgtttgacgtgctgtttaggcgcgcgtaattcaaggccatttcggcatagcggtctatgcggaacagctctgcggaaagtgcacggctgcgcggggtatcttcttcgccgagcatcagccgcatggcggagatgggcgttttgatctggtgtacccacatggtgaaataatcggtgttctcctcctgcccacggcggcggtcggtctcactttgggcgagcttggtgcacagcatgcgcacggcttcgtcataacacacggccgtgctgcccgagggctccgggagatcatcgcgcgattcgggcagattcaaaagcgccgattccaaccggcgaaactgcttatgaaaccgcagatagcttaaaataaagcttaaaagccccaccgccgcgcacagcagcgccgcgtacaaaacgggatcggcgggcaaatcgtataaatagaggatcaccgcaaaaatggcaaagcacagtagcaaaaacgcgatctgcaaaatgtgtgcgcacaggtatgagaaaaacagcgcgctttcttttttcttcatgggtcacctcacaaaacgacatagccgctgccgacgcgcgtcgtgatgaaatcggtcaggccgatgccggaaagcttcttacgcaggcgggtcatgttgacggtcagcgtgttttcttcaatgtacaggtcgtattcccaaaggcgtgtcatgagcgtttcgcggctgacgaccttgccgcggctttccataagcgtctgtaaaatgcggaactcattgcgcgtgagctgcaccttttggccgtcgtgcgtcacggtctcatcgttcagattcaagaccgcgccgccacgctcaatgaccggcacacggtcgccgaggtcgtaagtgcggcgcaaaacggcgcgaatttttgccataagcacggaggggtcgaacggctttgcgataaaatcatcgccgcccatgtctaccgccatcaaaatattcatattttccgacgcgctggagacgaaaatgatcggcacggcggatatttttcggatctcgctgcaccagtggtagccgttaaaaaacggcagggtgatgtccaagaggacaagatgcgggtcgaaatccgtaaattcgcgcagaacatcgcgaaaatcgcggacacagcgcggggtaagcccccaagattcgatgatgcggctgacctcacccgcaatagcctcatcatcttcaacaatcaaaattctgtgattttccatagtatctccaatttacaaattgttagcctcacttctctccgagtacccgcttcaaaaacgccgccgagcgctccatgcatttcagctgctctatggagccgaaatgttctgccgcaaagctgccggtgtaaccggagtcaagcaaaacacgcatcattttttcaatgggcagattgccatcgcctaccgccacgggatacagcttgcggtttgcgaccgtgacgcacggactaccggcgttttccgtaaacgcgcggtctttgcagtgcacggacgcaatgtacggacggaacaaggaaaagctcttcaccgcgtcctcctcattataaaggaaattgccggtatcaaagccgcagcgcagaccgggcacatgccgcatgaaccacatgagctcatcggcacgggagtacggcgccgtaaggttatcgaactcctccatgacaaccgtgatgccgtgcttttccgcttccgttgtaagctctgttaaagatgccgccatgcgcagacggcgagcttcatactttgcgctgccgcgcaccatttcgtcctccgtcaaaaaacccgccacggcaagcaggaacttgcagtttgctttttcgcagcagtctatgacgcgcagagattccgcacggtcattttccggggagcccgtctcgctgccgaaatcaaaaaaattataaatgccgttcacgcaaagaccggatttttgcagcgcaggcaaaattatatcaccctcgtttttgatgcggttcgcgtcgagctccacaccgtcaaagccaaagcgttttaccgccgcgcacacttcatctaatgcaatattctcctgcttcatggcttctgccatgtgctcgtaaaaaacagaaattcggttcatataaacgccacctccaaaagtattttcagcatagcaggccatgcggattttgtcaatgcaaaacccgcaagcagcacgcgttccgccgccttttccgaaaatttttcccggcggcacaatgtgacagaatcaaaatttgtcccacatgtatactggtgtcgggaggtgaaagcgtgaccgtttatgccgatctgcttttcatcgtgaacctctacatagacgcgcttttgctcagcgcggtacggcgttttttgcggctgccgcttacgggaaaaaggcttttgctcgcttccgtgctcggcggggtgtttgggctttccgccctgctgcccgcgctgccgggggttgttttgtttccgctgacgctgttggaatcgcttgcgctgtgcgcggcggcgtttgcgccaaagccgatgacgcagcttttaaaagccgtttttttgctgtttttgtttggcgcggcgctttccgggcttttgacggctgcggcgtattttctgccgatacacggcattttgctcgcaaacggcgcggtgtattttaacatttccgcattgacgctcattttgctcacgtgcgtctcttacggcgtgctgtacggcttcgaccgcctgtttcgaaaaaaggagccggacgtgtttttcgcaaaactgaccatcacacggcagggcaaaaccgtcacgctgccggcgaaaattgacacggggctgacgctgacggagcctttttccggcacgcctgccatcgttgcggatcgatgtgcgctcggtgacatattgccgccgaatttcggaatgcaaagcacggaaaatgctgtttctatgcggctcatcccgttttcttcactcggagcggacggtgttttgcccgcgtttcagccggatgcggcttcgctttcgggcatatcaatcgaatgttgggtagccgtgaccgaccgcacgctttccgcagggagttttcaggcgctcgtcggcgccgccgtgtgtgacgccgcgcagatacagggtttaaaacccggaaaggacatcccatgaaacacgattttctcacccgcatgcgcgaaatttttgctcactttttatcaaagctgaacgaagacacctgccactacataaacggcccggaaacgcttccgccaccgctgacgaaagcggaagaacaggtgatttttcagaacatccgtgacggaaaaccgaacgcacgcgaccctcttattacgcataacctgcggcttgtcgtgtacattgcgaaaaaatttgaatcgcctgccgtgaacgtggaagacctcatttccatcggcaccatcgggctcatcaaagcggtaaatacgttcagcgtggagcgcaatatcaagcttgcgacgtatgcttctcggtgcattgaaaacgagattctgatgtacctgcgcaaaacggcgcagctgaaaaacgagatctcgctcgacgacccgctgaatgtggattgggacggcaacgagctcctgctctccgatctactcggcagcgaccccgacattgtgaatcgcggcatcgagcaggaatcggaaaagcaaacgctgctccgtgccgttgaaaagcttgacccgcgcgaaaagcagatcatggagctgcggtttgggctgaaccggcaaaaggagcacacgcaaaaggaagttgccgatgcactcggcatttcgcagtcgtacatctcaaggcttgaaaagcgcattttgcaccgattgaaaacagaaatggagaaggcgggataaacacgccataaacacgacaaaaagcagatgtatctaccgattttggtgacacatctgctttttctaaaaaatacaccggttttaaagtattcggtttatacgagcttcaaatatttgaccccatacggcggcagctccaccctgccgtggatgtcgcttgtttcgccggttaaaaaatcgaccgctttgtactcgccgcgggcgtctatggagcacggcgcgttttccgcattgacggcaacaaacaccgtctcatgatcacaatgacgctcaaacagcagatttttattctgaatggtgatgttcttataatctccgtaatttaatgcgcggctttcggtcttcaccttcgcgagtttttcgatgaacgcggtcagctcgttttcgacgggtgcatcgaagcacgggcgcagggcgttgtcaccctcatgcttttcgccctttgcgccccactcgctgccgtaatacaggcacggaatgcccggcatggcgaacagcacgccgtacagcgggtaaatttgcttttcgtcgtttaaaatgctcgcgatgcgcgttacgtcgtggttatcggcgaagttcatcaggtgcttgccgcggtacagcgtccacggctccgggccgaactgccgcccgagcgaatgcgcaatctcaaagagattcatcgaattgaacgcagagtaaagccctttgtagcactcgtagttcgtcacgctgtgcagcaggccgtctgcggtgatgcggttgtaatcgccgtgaatcatctcgccgatgagcacaaactccggctttttgccgtcgcagtacgcgcgcaggcggcgcatgaaatcttcattcaacatgtacgccacgtcaagacgcaggccgtcgatgccgaattcgtcgatccatctgccgacgcagtttaaaaggtactcgacaacggtgggattatagagattgagcttgacaagctcgtaatgtccctcccagccctcgtaccaaaagccgtcgttataggcgctgttaccgtcgaaattcaagtgaaaccagtctttatagggagagtcccactttttctcctgcacgtcacggaacgcaaaaaagccgcggcccacgtggttgaacacgccgtcaagcacaactttgataccgttttcgtgcagcgcatcgcacacggctttgaagtcttcattcgtgccgaggcggcagtctatctttgtaaaatcacgcgtatcgtagccgtggttgtccgattcaaacaccggggaaaaatacaccgcgccgatatgcagctttttcaggtgcggaatccaccctttgaccttttgaatgcggttcacgcatacgccgtcgttcggcatgggtgcgccggtaaagcccaagggatagatctggtaaaacaccgctttatctgcccacattgttatattcgttcctttcaagagagttatactgacttcaacttaaaacgtatacatgccgtctgccgtctggcggatatccgcattatagaacgccgtcatggcctttaccatgtacgcggtgtccttttcgcccgccgtctccacgcaggagtgcatcgcgagctgcgggatgccgatatcgaccgtgttgagcgacagatgaccgtttgagatattgccaagcgtggagccgcccgccatatcggagcggttatggaagatcatcaccggcacctcggccttacggcagatctcgccgaacacggcggcagaaacggaatccgtcgtatacttctggtttgcactgtacttgatgacgatgccgccgtttaagtagcagcggttcgtctggtcacacttttccgtgtagttcgggtgcacggcatgggcattatcggcggaaagcatgaagctatccggcattttgcgcagccactccgcttcagggatattgagcgcggaagcgatgcgacgcacggtatccgtgaggaacgtggaatctgcgccctgctttgtcagcgagccgacttcttcgttatcgaacacggcgctgatgagcagcttttctttgttttccgcgttcaaaaacgcttccgttgcggagaacgcgcactggaggtcgtcgaggcgcggggatgcaataaattcgttctccatgccgaatacaacgccgtgctggcgcggatagaggaacatatcgctcgagatgacgtcttcctttttaacgcctgcctcttccgcgatgagcgcgttataatcggcgttttcgccgccgagcaagggcagcagatcgacctgcgggtttaacttgtggtctgccatgccgcgcgtcatgtgaatggcaaggctcgggatgatgcacaggtcgcggtcaatgttcaaaagtacgctctttacgccgctttcggtacgcaccacggcgcggccggcaagcgacagcggacgatcaaaccacgtggaaaggatcatgccgccgtagccttcggtgttgagttttttgtagtgaccctctacgatgatctccgcgccgctctttacgcggaacgtcggggaatcgctgtgcgcggagacaatctgcatgccgttatagttttccggcacggagaacgccaaaacggaggagccgttgcgcgtcgtaaagtagcgcttgcccttttcgagcgcccaggtttcgttttcaagcaggcgaatgcagcccgcatcttccaacattacacatatatttttcaccgcatgaaaacacgacggagaagcgtcgataaacttcagcagcttttcggtggtttcagaagtctttaacatttcggtcattcctttccttgtttctattcatcatagcacaaaacgacaaatatgggtagagcaaatttcagaaaaaagaccgccgcaccgaaacagtacgacagtctttaaaaaatgaattcatttgcacgcatttccgatggcttcgttcacgcgctcgcgcagatcaggcagataggacgatgtgcgcggatagtttgcaaacgtcatgctttcgccgtctccgagcagttttaagacgttttcgcgcccgagcttttcttcagcgagcgacaacgcgcgcatatcataaagcgccatggcgaaaaccttttgccgcagcgacggcagcgggccgttttcgccgggatagacggaaaatccgtcgccacccggaaacgcgccgcctgcgtccgtcaccttgaacggatcaataaccgctttggagagctgcgagttccagaagttatagccccagtgcaggaagcccgtgatgtgatacttccacatctgcacgcccaaaatgcgattgcggtttgagggcatcgcgaggaaacggttgcccacgtccacgcactggctgcagcaggtgtacgcccacagatccggcacatcgttttcgataaacggcgtgatatggttcgtcgcgacgacggggtgcttgacgagcccctccgtgtagtaatcatacgacgagagcgcgtcgcgcagaatgcagccgggcaaatacggctccacaacagctttcgcctttaagtagtccgccttgtgctcctcgctcggctcgtccgaaatgtggaacataaggtcatttttttcaacgcctacttcttcaaagaatgtaagcagctgcggcagcagcgcatgcaataatgccgcgtattccgggtcggttgccgcagtatgccaaccgaatttcagcttgcgttcgccgttttcggtgacgtagatattcggcgcacattttgcaccccactgtgtgaagaagtgggaaatctcaaacttagaaatgccgcagtcctttgcggtttccacccagcgggcaagccttgcgaaatcaaaatgataacccgcgtcgttctttgtgatctccacaagctgcgtgcacgggcgttctttgccgatctcggtatcgagcgcgggagtgaacaccggcgtcaggatcatgttcatgccgtgttccgccgccatgcgcatatatttttctaacaatgcccagtgctcttttgcgtaaatctccacgccgtagcgcgctgcgatgcagtctccatggaaccactgcgtgaacgtgagcttctgctccggcaaagtgaccggcacgaccgtcaaacggaaaatttcgcttttgccgtttgcgctgatctccacagggtaatcgccgcccgcggcatcgtcgttcactttgaggctcacccatagcacctcgcggccgttgacgttcaccgcgccgtccgtgacgggatacagcacatccgggaacgtgctcggctctattgtgatgtagtcatcatcgaacctgtccgggtatgcggaaagcgtgcacggcacatagccctcgcggtacaccgccactttaacgggtgcatcggtgcgcacctcaatgtagtgctcgccctcgcccgtgacgatggcctgaaacgcggtctcttctccgcgcagagcgctcgccttcgggtacggcgcaaaggtcttttcttcctgcgccatgacttttttcatcggtgaaagaagctggatcgttgtctgcatggatttttcctcccctaagttgaccgtgtcaaactgtgtaaaatccggtatataacgttcgccggcggcactgcgcttttggcagaagccgggcaaacccagttccaacatataattttgtaccttgcggctctcccgcagggtgatgcggcggttgatgtccgcaaattccggctcatgcaaaacacgtcccatcggcgtatactggctcatcaggctcacgggcacgcccgagaaatgctgtttgatgagctccagcgcctgcatggaattgcgcgtgtggccgggcaaaatgagctgccgaatgatgatgcccttttgcagcatgccgttttcgtcgtacacattttcgcccgtctgtcgcaccatctcatgaatggcaacaagcgccgtttcacagtagtgcggcgcattggaaagccgcacggcgagatcgtcgtccgcatatttgaaatccggcaggtaaatgtcgacgagcccctctaacatgcgcagtgtctcgaccgattcatacccgccgcagttgtagacaacgggcacgcgcggcttataaatgcgcagcgcttcggcaatttgcgatgcaaagtgcgtcggcgtaacaaggttgatgttgtgcgcacccatagcttcgagtttttttatcgtctcgataaattcttcaaccgtaaaatccttgccgtgtaggctttcaccggagatctcgctgttctggcaaaacgcgcagcgcagcgagcagccggtaaaaaagatcgtgccactgccgcgcgtaccgctgatgggcggctcctcccagtaatggagcttcgcgcgcgcaatgtgcattttgccgccgctttggcagtagccgcgcatgatttcacggtcaacaccgcattttcgcgggcacagtatgcaaacgctcatgcgttttgttccctgagcatcaggaacccggcgttagagccgcgcttgccgcgcgtcacgcggtgtgaaaacagcagatcactgttgcacatggtgcacacgccgcccgttgtgatgtgctcgggcagcacgcctgcacctaataagaacgcacggttgcacgcccaaagatcaacgtggaatttgccgttgccgtcgtccgtgacgaatttgtcgctgtccggcagcgcgaggaattcctccgcacacggggcgtccacctcaaagcactcttttgcaatggacggaccgatggccgcgagcaaatcctcggggcgggtatcaaattcctcctgcattttctctacggtagcttttgccatgccgttcaccgtgccgcgccaaccggcgtgcgaaagtccgatagcatgatgaatggggtcgtagaagtaaagcggcacacagtccgccgcgtaaatgagcagcggcagattcggctcatccgtcacaaggccgtccacgctttccatgtccttcggcttccaaatacccgtgccggcgtttttcatcgtgacacggcgcacgttcgtgtggtgatcctgcgcacccgccgtaatgttctctacaggaatattcgccgcttgagcgatgagacggaaattttcttttacattttcgtcgctgtcgccgcggttgaagccgaggttcatagcagcaaactcttcttcactcacgccgccgatgcgcgtggagaagcagtgcgtaaggtacgggatattctcccacgccttaaacgtcagcagtcccacaccgttttccttgattgtcagacgcatatcggcgatatttgcgttttcggcgcggcgcggtttttcgattttcggcagcggaatggattttcgactcacgataataccctcatacttctgcttcacgcgcagctgaccgcagaattcatagccgcacttttcgcacttaaatatgctgcgcaggctcttgtttttcacagtccatttgccgcggcgctttgcttcgccgccgcatttttcgcacgtgaaatgcagatgctctttttcgatcaacgggctgttcacgtcgcagatatacgtcgttttaaacgtgatgcgtctgtaaaactccgggtccttgcagtcctgaatgaacgggcggaacgtatcctttgtataaatgcgctccagcaccatggcggacagcacgctgtcgtcgagcgcgcggtggtggtcgagcgcaccgtcatcaatggaaagcagctctgccgctttggaaagcccaagctgctccttgccgtcctcgtcaaggcgcttttccacgtactgctgtaaatcgacatagcgctgcaaaaacggaacggtctccccgccgccgaaatagcggcagttttcaatcagcgccagaatgtccgacgtgccccacgtggcaatcacgcagtcgcccgcccattttttgaagcggctcatcacctgcatgtacgggcgtgcgtccaaaagattcgcatccgtaatgttggtgaggtccgagataaccgcgctgatcttttttgtcacctgcggtttgacaaagcaggaaaaccggtctgtgatattcagttgtgcatcgagcttgaccgcgccgaactcgataatctcattgataaagccgtggagacggcggctgtacgcaccgttccactccagatccaaaataacgatattcattggctctccgtgtgtcttttccgttggtcaagtttatgaattacttctttttcgcagcctgcttcatgcgcagctctttgctcagcaccattttgcgcatgcggatgctcttcggtgtgatctccacaagctcgtcgtccgcgataaactcgagggactgctccagagagagcacggtgtgcggggtcagcttcagtgcgtcgtcggagccggaagcacgggtgtttgtcgcgtgcttcttcttgcagacgttgatgacgatgtcgtcgcccttcgggttgctgccgacaatcatgccctcgtaaaccggtacgcccggcccgataaacaggcggcctctgtcctgtgcgtagaacaggccgtaagccgtggactcgccggtctcgtgtacaacgagagaaccggtgctgcgctgctgaatgtctcccttatacggctcgtagcaatcgaacacgtggttcatgatgccgttgccgttcgtgtccgtaaggaactcggagcggtagcccatgatgccgcgggacgggatcttgaattcgaggtgcgtggtgccgctgtcgcgggtacccatgttgagcagctctgcctttctggtgccaagcttttccatgaccgcgccgacgtagttatccggaacttcaatcatcaaaagttccatcggctccagcttcttgccgttttcttccttgaaaataacactcgggcgggagacctgaaattcgtagttctggcggcgcatctgctcgataagaatggagaggtgcagctcgccgcggccggataccttaaacgtatcggcggaatcggtctcttccacgcgcatagcaacgttcgtttcaacctccttaaacaggcggtcgcgcaggttgcgggaggtgacatacttgccctcgcggcccgcaaacggggaattgttgaccatgaacatcatagaaacggtcggctcgtcgatcttgacgaacggcagcggctccacgtgctccgggtcgcaggcggtctcaccgatgttgaggtctgccatgccggaaacggccacgatgtcgccgagctctgcgctctctgcgtccacgcgcttgaggccctcaaactggtagagcttcgtaatgcgcgcgttgcgcttttcgtcgcttgtgctgctgcagatggtaacggtctggccgacctttacggagccgcgctccacacggccgataccgatacgaccgacgtactcatcatagtcaatgttggagaacagcacctgcgtcgggccgtcaaggtcaccctccggcgccggaacatcgtttataatggcttcaaacagcggcttcatgtccgtgcccttttcgtccggctggttcatggcgtagccgtcacgtgcggaagcgtagaccaccgggaaatcgagctggtcttcgtctgcaccgagctcaatgaagaggtcaagcacttcgtccacgacttcaagcggacgtgcgcccggacggtcgaccttattgacgacaacgaccggctttttgccaagaccaagcgccttctttaaaacgaagcgcgtctgcggcatacatccctcaaacgcatcgacaagcagcagaacgccgtctaccatcatcagaatacgttccacctcaccgccgaaatcggcatggcccggggtatcaacaatattgattttgatgtcattgtacatgacagctgtgtttttggagaggatcgtaatgccgcgctcacgctccaaatcaccggagtccatgacgcgctcggttacggcttcgttgctgcggaaaacgccgctctggcgcagaagctggtccacaagggtggtcttgccgtgatcaacgtgtgcaataatggctacgttgcgcaaattttctctttttcccatctttatcaatccctttctttatcgttcttaacttcaaactgcttcaaaaaattcaaaaccggccgcgccgttttgcatgcgcgggatacggcaaaaaacggattaaaaactcggtttgctcgctaaccgaaatattataccacttttcgcgcgttttgtgaatatgttccgccttggcgaaaccgctgaaatattgggtttttgcgttttttcttttgtcctgctttccttgacggcgggctttgttcgtgctattcttgtattgattttgaaacagaggagtgcaaaaccttgaagaggatcttgaatttcggctcactcaatacagactatgtttataaggtcgaccacattttgcagggcggtgagaccattcaaagcgaaagccgcaccgtgttcccgggcggcaaggggttaaaccagtccattgcgcttgtgcgggcggggctttccgtctgccacgcgggactcatcggcacggacggcgagcacctgcgcgatttattgaaccaaaacggcgtggatacctccctcatcgaaacgcgcgatatgccgggcgggcacaccgtcattcaggtcagccgagaggcgcagaacgccattctgcttttcggcggctccaacggggctgtggatgaagcatatgccgaccgcgtgcttgcgcaattcggcgcaggcgacattcttctgctgcaaaacgagatcagcgcgctgccgtatattcttgaaaaagcccatgcgcgcggcatggagatctggctcaatccgtccccgatgaacgaaaacgttttaaagtgcaatctgtcgctcgtttccgtgttcgttttgaacgaagtggagggcgaacagctgaccggcacaaagattcccaccgctattttggataagctccttcaaaaatacccgcacgccgccgcagtcttaacgctcggcagtaaaggcgcgtggtacgccaaagaagataagcgcgcgtttgccccggcggagcttgtccgtgcggtcgataccaccgcggccggcgatacgttcacgggctatttcatgcgcggtatgctggatgggctttcgccgaaaaaatcgctgaccctcgcggcaaaagccgctgccattgcggtctcgcgccccggtgccgcaccgtctattcccctatatgcagaagttacgaacgaaaggaactgaaaatatgagtgatttcagagttgcagtacgcagaacgaacgagtgggacggcccgtccatgctcaaaatttacacaccctacgtcgaaaagacgcactacacgcccgacaccgaagtgccgacgctcgccgagtacgtgcagcgcatcgacacctatacatacggccgtatgtggattctgacggagatcaacaaccagacggcgggattctgctttttgaccgaccgcgatattccgaaagacgacctgttctctgccgacgcacagctgtacgtctccgaaaaatgtctgcacagcggcgtgggcacgtctttatacagcctgatgctggacatcatgcaccatgcaaattaccgccgcgttacagcgcacatcaatctgccgaacgatgccgccgtggcattccacaaaaagatgggttttcacgaggtctccgaaacggacggtgttcttttaatggagcgcgccattgaaccggaagacccgaacgcaaagcgattcacgaaagcctacctcatcttagcgcaggactacgaggccgcgcgtgagcacgccgccacatttgttaaagaaggtacggtggtataatgggcccctacgaatacgaagtggcgagcatcgacggcgactacgccattttgcgccgaacggacaatgacatgcacgatgaaattctggtcgctcgcgcgcttttaccggaggagattgacatcggcaccgcgctgcactacgaaatgttcacctattccatcgtttaacatttaattattggcaaaaataaccaaatatttttcccgttgatttgggtaaaccgttcattgaactcacattgctttcttggtacaatgatacttgtaaactaacacgcagcgaagaggttctacaaacgcggtttacccttattttctacggaacggtttaccttaatcttactttttaggagttgttgtatcatgtccaaaccgtccggtgccatcgacatgacgcggggcaaaccgatcaacctgatgcttcgttttgcgctgcccatgatgattggcagtattttccagtcgctttattccatggtggactccgccgtgctcggccgcttcgtcggctcgcacgcgctggccgccatcggtgccaccacatccacaacgggcctcatcctgctgcttgcaaccggcgtgacgagtgccatttccatcgtgctttcgcaatacgtcggcgcaaacgacaccgaccgcgtgcgcaagggcatcgtcgcctccgggtggatcacccttttgctcggcgttgttctgggtctcatcagcgttttcgccgcgcggccgctcatgcagcttttaaaaacgccggaagacgtcatcgacatgtccgttttatacattcagattgtctgcggctgcggcatcgcacagtttgcgtataacgccgcggcatctatcctgcgcgcactcggcgacagcaaaacaccgctgtatttcctcattctgtgctccattttgaatgttatcctcgacctcatcagcgtcatcggactcaacatgggcgttgcgggcgtcgccgttgcaacggtcggctcgcaggccatctccgccgtcatctgcatcctcgtcatgttccgcaaatatcccaatctgatgccgaagcgccacaccctgcgcccggatatgcccgtcagtcttaaaatattcggcatgggtgcgcaaatggctctgcaaagcctgtttctttctgtcggcatgatggtcattacgcgcgtcatcaacggctacggctccaacgtcgtcgcggcgttcaccgtcggcagcaacgtgcagaacctcgccgtgatgctgttcagcaatttctcgttcggcttttccgtctatgtcgggcagaacttcggcgcgaaaaacgcggagcgcatcaagcttggcgtgcggcaaatcttccttcttgtcggcggtctgagcttttttgcaggcgtgctgacactcatttttgctgagccgctcgtctcgttgtacgtcaagccgaacgagaccgaagtcatcgcgtattcgctcgaattcatccgcattcaggcgtggttcttcccgttcctcggatggatctggctttataacagcaccgtcaagggcatgggcaaaatcaacatttccatggtctcctccgttgtggagctgtgcagcaagatcggtctctcgttgcttctgcccatctggatcggcaccacaggtatttggtttgccgcgccgatcggctacattctgggcatcatcccgctgctcatctactattacagcggccgctggaaaaagctgctcaccgtccccgccgcagaacccgcaaaggcgtaaaatacaacaaaacggcaaaagtccgaagcacctaaaccgtgtttcggactttttattctatcttaaaatttcaccccagcatcacgtccaaaagcatcattagcgcaaagcccgtcacaatgcccattgtcgccgcatacggctgcgctttctggttgcgctgacactcggggatgagctcgtgcaccgcgactaaaatcatcgcgcccgccgcaaaggacagcgcaaacggcaaaacggcttcaatgtacacggcaagcaaagcgcccaaaacgcccgcaatcggctccacaaagccggaagcctgcccgatgaaaaagctcttccttctggagcacccctcacggcgcaaaggcagcgagaccgccgcgccttcggggaaattctgcaagccgatgcccacggccaccgtcacggcacccatcagcgcttccggcgtatagccgccgtttttcagcgcaccgaacgccacgcccacagcgagcccttccgggatgttgtgcagcgtgatggaaagtaccaacaaaatgatgcggttcagccgtgcgtttttctcgccctgcgccaaagcggagcgccgctgcgcgtaggtcacgcatttatcggaaccccacatgaacaacgcaccgcagagaaacccgagtgtcgccaccaaaaacgcaggcatgcttcccgccgcctccgcgcgctcgatggccggctgcaaaagtgaccaaaagctcgccgcaaccatcaccccggcggcgaagccgagcatcaaattgagaattttggggttcggcgatttaaacagcaccaccgtagcagcaccaagcgccgtgacgagccatgtccccagcgtcgccaacaacgcataaaatacaatatcattcattttcagccctcctaattttattatatggagagagaaaaaatgagtgaaaaaagcacgcggtttttaaaaccgcgtgcttgccgcattaaattgatcggataatcttccacgcttccgtcagccgctccaagctccacgcggcgttcgcggggctagtgctcggcagaaccgtttccggcaagtcgatctctttcgccagatagttttgatacagcttgtgcgccatttgaccgtttgtacacacatgcgtgatgttcgctgtcgataaaatcacggaaagatcattcggcacaacgtttttgatgctcgcgtcagacgagcccgtcacgtcgcacgaggcaatgacgtcccacaaggcaactttatgctttagcaaaagcgccttcttttcggggacatcccccggcaccggttcaccgaaaaccgcgctcaagacgcgccaaaagcggttttgcgggtgcccgtagaaaaacgccgcttttctcgactgcacagacggaaacgagcccaaaacgagcacgcggccgttttcgtcgaacaccggcggaatttcgtgctgcaccatcagtgtaccttctcggcaaaatccttcttgcgctgctcgtaggcctccatgttttccgcttcaaacgcaagcttcacatcgcccgcgcccatcaggttcaaaatgtactttgtaaacggcggattcaaaaccaagatcggccccacaaggtatgtgccgaagaagttgtttacgcggataccctcgtatttcgcctttatattgagccccacacctttgtttttcacgaacaagccgtgcgattcatccggcgtgtaggccatcgtgaactgcgtcttaaagcccatgatgacattgccgtcaaattcgccctcaaagtcgctgttgtggcggtgcatcatatcgcgctttgcgtacaaacgataaagcccaaggcactctacgcggctgccgtcctcgttttcaatgtaatcgccgaagatttcgagcgcattgcccgtgaaaaggaacaccgtgccgtcgtcaatggctttttggattttctccttcagcggcatcaacttgcggatgacctgctcctgcatacgctccgtcatgggacccatatacacaaggttcattttttcttcggtaaagcgcacatcgtcgctgaatttcgtgcggataaactccgcttccggcagcgttttttcaaggtagaccatgttgtacgcgtcgccgaacaggttgcagaattccgggaaaaggacttctattttcatttcgtctcgccctccttctcacgttcgatcatcttatcgcgaatgtcatttgccaaacgaatggtgtatacgtcgtacagaataaagactgtatccgcttctttcgagaccgccgcaggcgtatcgctttcatcgcgcatgtgcacgatcttctccgccggcacaccggccagaagcgtgcgcacatacgtatcgtggtggcgcgcaccggcaatgacgacctgcacgatgctcgggtcatttaaaaactcaaaatcggtgtcgtagaaccacgcggtgttctccacggtgtggcgcgcatcgaagtagtcgtcgagaaacatcacaacggactttttgcccggcgcgttacggatattttcaaacgcacgggagcacgcaatggggttctgcccctttgcaaggtgcagaatgtactttctgccgttcacttctttttcagagtaacgcgtctcgctgatgcccattttctccatagaattgcggattttttcttcggaaaggccgaattcacgcagcgtcgcaatggcggcaagggcgttataaatattgatgttcgtactgttcaaaagcgggtattccgatttttttccgcccaccgtcacgttcattttcatgtctttcgtatcgatgtccgttgcaaggtagtcgatgtccggcgagcggtagccgcaggcttcgcagtgcacacggccgatatgatggtagcgcacaatgtcgtgcacaagcggaccgtggcattttgggcaggcaggcacatcatttacgatattgtcgcattcctttttgtccgtgtcaaggtggtcgatgccgaaatatacgcggtcgttttcgggcttaatggaactgcaaagcgggtcgtcgccgttcaaaacgagctttgtgttctttggaatttccttattcagaatgtcgaggataaactccgcgtgcgcgttgcgcttataagaatcacggaaaatattcgtgcacagcacaatgtccggctgcatgtaggggtaaatgttcggcgcagagcgctcatcaagctcaaacaccgcaaggtcacacttcggcttgccgaaaaagtgactgttcgcaatgagcgtagatgccacgccggtcgcgacattcgtgccggagcggttgcacatgaactcgatgccgttatcctccaaaacatcctcgatcatgttcgagacagtcgttttgccgttcgtgcccgtaatgccgatgatcttcttcggtttcggcatgcgcccgataaaatccgggcacagaataatggcccaagagcccggcatggacgtgccctttcgcccgatgagctttaaaaccagcgccgtaccgcgggcaaacatcagcgcaaaataaaagcgtaaatttcgtttcattttcttcattccttaaatttgaattttccgtttatcgatacgcatgattatactacttttagacgtgaactgcaagatgaactgcaagataacgccgttttgaattgtttcggctctgaaattgcgaatatttaggaatttttcataatcacggattgatttttcacaaaaaagactgtatgataaagaaaagcaatccattaatttaggaggagttcaccatgaaaactttacccgtagcggtacaggtttattctgtccgcgatgacgctgagcgcgattttaagggcaccatgcagaaaatcaaggacatgggctatgacggcgttgagcttgcaggcctttatggcatgaagccggcggaagtcaaggcgattttggaagaagtgggcctcgttccgctttccgcacacgttccgttccaggagctcgaagccgacatcgaaggcacggtcgcacagtataaggagatcggcatgcagtacattgccatcccgtatctgatggaagaagatcgtccgggcaccgagaagttcctcaagaacattgagaccttcaagaagatcggcgaagcctgcaagaaagtcggcatcacgctgctttaccacaaccacgatttcgagtttgtaaagatgccgaacggtcagtatgcactcgattatatctataccgagattcccgctgacctgctccagaccgagcttgatatctgctgggtcaaggtcgccggcgaagagccggtcgattacatcaagaagtacgccggccgcgcaccggtcgtccacctcaaggacttctacaaggaaggtaagccggccaacatgtacgagctcatcggcattgagaccgagaagaagaaagaaaccggcaagttcgagttccgtccggtcggccacggcatgcagaacattccgccggtgctcgatgcagcactggaagccggctccaagtgggtcgttgtcgagcaggatcagtcttatgacacccccgctctcgaagccgtgaagatgagccgcgattacctcaagggcctcggctggtaattttgctctaagtaagacataagaatacatattttcaaggcgtactttctctccgaaagtgcgccttcattatattcgcctgtcggcgaatgctatagtccttcggacaataaaaagaaaaacggctcccggcgcatgaaagcaccgtggagccgcgtatgtataagcgagatattatgcgcccttcttttcctcttcgtcttccggcggaagcacggatgcgcagtgcgggcatttcgtcgcgccgatcttcacgtcatccatcaggcagtatgggcaggttttcgtggtaggagccgtttgttttcccctcaaaatttccgatattgctgcggttttcgacagttttttcttgcagaagtattgttgaaaaccgtgaaatatgctatactgttttatacttttccgagatatacataggacgctcgatggtttaaggagatgcacgcatggcatataagatctggctttttctgtggtactttgtgcttgcttccttctgcggctgggtcgcagaggtggggtacatcggcatggtataccgaaaattcaaaaaccccggcatgctgaacggcccgtactgcccgcagtacggcctgatgattgcgctgccgtgggcggcattgacggcgctgcattggcagacgtcgtttgttgccacgctgtttttctgcctgatttcaagctttcttgtggaattcacgttcgcgtggctgctgcgcaaaacaacgcacatccgcctgcgtgattactccaaattcaagtggaatatcaagggctacgtttccgtgcccgtcgccaccgtgcgcggcgtgtgcttctcgttcattgtggtgttcatcgtgccggtactcacgtcacttctgcactacgtcaaccgcaccgtcggctgggtcatcctctatgccgtcctcggcatcatgctgctcgacatcatcatcacgtccatcaccgtgcagcgcttgaatcaccagtttaaacgcttatccgaactcggagaccgcgtgcgcgaggcgagaaacgccctcggcaatgccgtcaccggcggcgccatcggcgcagcggaggccatcgatgacctcgacctgcaaaagaagcttcaggaagcacagaagaccgccgacgaaaactacacagcactcctcaacaaatcgaacttcttaaagcgccgcttcatgagcgcctcgccggatatgacgaacgagcagtacgaaaaggaattaaaagcgtaccgcatcacgacggaagagcgcaaaaagcgctccgccgaacgctggaagcgcaaccgctatgaatatgaagctacattcgaaaacccggaagaccgcccgtttgcgttcggcatgaacttcacaaaactcttctggatcttcttcatcggctgccttgccggttttgtgcttgaagaatgctgggcgttcttcatcgcgcaccagattgagttgcgtgtaggccttgtgtacggcccattccaacccatttacggcggcggcgcagccatcatcacgctgtgcctgtataagctctacaagcaggacgacatcgtcatttttgttgccagcggcatcatcggtgcggcgttcgagtatctgtgcagttggggacaggagatgctgttcggcaccgtttcgtgggattacagcggcacaccgttcaacattgacggccgcacaaacttgatgttcgcgctcatctggggcacgctcggccttatctggatcaaagaaatttaccccgccatgtcgcgcatgatcgaaaaaatcccgaagcgcccgggcgctatcctcaccattttgctcgttgcgttcatgctgtttgacgggctcatctcctgcgccgcgctgacccgcgccaacgagcgcgccgagggcatccccgccacaagctcgttccaaatgttcctcgataagcacttggatgacaactacctcgcactcgtctacccgaacatgcagaaggtcaacgaagacggcacgaaaagcgaaccgctgaaagacacggtaaagaacacgtaaacgcaatccgtccatactgcggcaaagaaatttgaagctgtttcatcacgaattaaaaagaatccaccgtatcgctttcacacatacggtggattccttattttatcgtattattttcgattcagcgtacgctttctacaaacgttctgaacgcttttctgccctctgccgtgcatttgtagacgcctgcgttctccagcacctttacaaacacctttcccacttcctgctgcaagatgtgctcggcattcgcttcgttcatttccgggtggtcgcgcttcacctgcgctgcccactccgcgtgctttgcgatgctctccacgcttgaaacatcgccgtttttcagcatcacgtctttcagggtcttcagctcgtctttcagtctggacggcaaaaccgcgaggcccataacttcaatgaggccgatgttctctttcttgatgtgatgatattcgtcgtgcgggtggtatacgccgagcggatacttttccgtcgtaatattgttgcgcagcgcaaggtcaagctcgtatacgccgtccacacagcgcgcaatcggcgtgatggtgttgtgcggctcgccgtccgtctccgcaaaaatgaacgcatcctcgtccgtgtagcttctccacgctttcaatacatggtcggccgcgtcaatcaggcgatccgggtttttatggcgcaaacgcaaaacagataccggccagttcaaaatgcccgcttccacatcttcaaagccgtgcagcgtgcagtgctcctccatgttcgcgcgcgccatcgcgaacgtatagtggccgccctggtagtggtcgtgtgtcaaaatggaaccgccaacgatgggcaaatcggcattagagccgaggaaatagtgcggaaactgctccacaaaatcaaacagcttgcggaacgtgctcttgtcaatctgcatcggcacatgctcgccgcagaacacaatgcagtgctcattgtagtacacatacggagaatactgcaaaaaccaatccgcatggttcaccgtgatcgggattgcgcggtggttctgtcttgccgggtggttcatgcggcccgcataaccgatattctccttgcacagcatacaggcaggataaccagaagccttcattttctttgccgcagcaatagccttcggatctttttccggctttgaaaggttgatggtaatatcaatcgcaccgaaacgcgggtcgttatacacccactttaaatcgcgcgccacacggtcgcggcggatataattgcagtcgccgcaaagcttatagaaccagtccgtcgccttttccggggattccttgtaaagtgcacgaaacgtgcggttcacatcggacgggcgcggtgtcaaaaggcccatcagtttcgtgtcaaataaatcgcgggacgtcgcaccgtcctcgatgatgccgcgctttacggcttcgtcgcaaagaccgtccagcaaaagtgccaggttttcgctctgctccgcttcctcatccgcgtaatcctcttcacaaagcgcctccaataaacggttgcgcgtgtaaatcgtgtcttccgcttcgatgagccccgtgcgcacgccgtattcgacaagcgccttgatttttccgaaaagcatactttttacccccgtatagctaaaaattcagaaggagagcgtaaaaatcagcgcatcctctcttggttctgtataaaaattgcggcgcacacccgcttccgtaaagccgagcgaacggtacatcgcaatggccggcaggtttgatgtccgcacctccagcgtgatgaaaacgccgccgttttcccgcgctttttcgatcagcgccgccatgagcgttctgcccacaccatggccgcgaaactccgggaacaccgcaatattatccacatagctttcgccgagcaccgtgtgcatgccgccgtagccgagcacctcatcttgctgcatcgccaccaaaaagcacgcggcaggattatcaatctcctccgtcaggcttttttcgctccacggttccgaaaagcaaagcttttcaagctccgcaaggcgcgaaacgtgctccgccgtcatcgaaacaatctgcataaacgctccttaaaaaccgagatgctgctcaaacgtctgcaattcctcgcagatcttgtcgcggcacttgcggtaggtatttaggtccccgccgtagggatcgtcaatgtaatgcggcacgtaaatcttctccgccggcacacccgcctgcatcaaaatgtacgcatgggttttcgacatcgtgaaataaacgtcccacacatcgatttcttccggcgtaaagcggcgcgcaatgtgaccgctaatgtccacgccgatctctttgcagaccagcaccgcattttcactggggtgctgcccgtccagcgcggaaaggccggcgctttggcacatgatattctcaaagccgcgctgctccatttcgtggcggaaaatgccctccgccattgggcttctgcacgtgtttccggtgcagacaaacaaaattttcatctttattataaacctcgaatacttctataatcggtcgtatttcgtcttccaaaatgaaaacgctcccgaacgaccgctacctatcatagcacagttcgggagagaattctactaagtattctttaattttcaatgaatgacaacaaaacaacaataataaacaacattgtgccgcacaaagctgctgaaaggcgcacccgcctacttcttcctgtaaaccagaaagtcaaatttaatctcggtctcgagcacatcgagcgcgcgcagacgctctccgccctctacgtccgtcttccagtagtacggcgtcatggagaacagcgcttcaatgctctcctgcccgttcaccgtgataaacttttgcacacacgcacggccgaggtattcaaacccgtcgtaggccgtgtcgtgctcttcgttctcatacggctctttgtataaaacctctttcatgccgtacagatgtcgcgcacccggcaccgcaaggatcatcacgccgcccggcttcagtaccctaaaaaactcctccggcacaataggcgcaaaaacgtccgtcagcacatctgcactgttttccgcacacggcaagtgaaataaactcgccaccgcgaaatcgatgcccttatatttgcccgcagccgctttcaccgcgaatttcgagatgtccacgccggaaaccgaaccgtttttcgctttggctttttcatataaagccgaagtgtaaaagccctcgccgcagcctgcgtccaaaacaacgccgttctcgggcagatatttgtccgtcagctccgccagtttgtcacggaacgcatcgtagtagccgccgctcaaaaacacgcggcgcgcgtccaccatctgctttgtgtcgccgggaatcttcgcgtgcatctgctttacgggcagaagatgcacatacccctggcgcgcaatatcataagaatgtccgtttgcgcagcgcagcgcgcggtcttctctttccaacgcgctgccgcatgcgggacagcaaaatatcatcataaacccttagcccttcgcctgataccagctcttaccgcttccggcctctgccagcatcggcacgctcagctgcaccgcgtttgccatttcttcttccagaattttcttcaccgtgtcgctttccgcttccgggcactccacaatgagttcgtcatgcacttgcaaaatcagctttgcatcgagcttttcggctttcaaacggttgcgcacgtgcaccatcgcaatcttgatgatgtccgccgccgtgccctgaatcggcatgttgcgcgccacacgttcaccgaacgcacgcatgttgaaattggagcttgcaagctccggcagatagcgtctgcggccgaacagcgtctccacatagccgtttttcttcgcttcctccaccacgcgttccatatagtctgcaacgcccttataattgcgcaggtaatcgtgaatgtagtcctcggcctcgcggcgggaaacaccgatatcctttgaaagcgagaacgcgccgatgccgtacacaatgccgaaattgaccgctttcgcacggctgcgcatctgcggggtcacaaggtcttcgggcatatcgaacacacgcgccgccgtcatagtgtggatatcgcgcccaagtcggaaatcctcctgcatctgcgtgtcgtttgccacgtgcgccaatacgcgcagttcaatctgcgaatagtcggcgtccacaagcacatttccctcttttgcgatgaagaaccggcggaattcacgcccaagcggcgtgcgcaccgggatgttctgcaaattcggctcagtcgaggaaatacgccccgtgcgcgtttcagtctggttgaagctcgagtgaatgcgcccgtccgccgtgatggctttcagcaagccctcgcagtacgtggaacgcagcttcgtcagcgtgcggtagcgcaaaaccttatcgaccgccgggtgcacaccgcgcagaccctccagcacatctgcgtttgtggagtatccctttttcgtctttttgccgtgcggcagtccgagctttacgaacagcgcttcgcccagctgcaccggggagttgatgttgaattcgtaccccacgtcttcataaatttctttctgcaatgcgtccacctgctcagaaagcacctcgccgtaggtttttatggcctcgcggtcaacaaggaagccgctttcctccatctcgcccaaaaccaaagcaagcggaatttcaatgttctccaataattcgtgctggccgttttcgtcgatgcccttttgcagcgccgcacaaacagcgggcagcacagccgccgcctgcacgttcgcgtcctcatatgcgggcacggcaatgccgtattccgccgccaaacgcagcacaccgtaatcggagcccgaggggttcaaaagatacgccgcaagctccgtgtccatcacagcgttttcaagggaagtcctcaaatgcagcgccgtgcggtgcagctttttcaacgcaaacgtgtactttttcgtcaccttactgccgaggaacgccttcaaaaacgcgtcgtccgcatccacgaccgcaatcgccggcttgcccgcgtcgaacttaccgttaaacacaagctgctttaattcgtcgttttcaaacaccggcacaaagtacgccgccccctcgtcctcacaccggccgagcaccgctgcgccgtctttataattcttcacgggcagcaaagccgtttcttcggcctgtgcgctgttcgccgtcggcgccgcgccgggggtcaggtgcaggcgttccatcagcttaaagagctccagccgcgtcatgagctgcgccgcagctgcggggtcgccctcgccgggaatataatgcgcaagctccgtatcaatcggcgcattacggcggatggtaccgaggtcgtagctcaaaaacgcgttgtctttggaattgatcagcttcgttctcatgccggacttgatgtccagctcatctaaattgtcgtaaatatactgcaaagagccgaacttgcggatcagctcgcccgcacccttttcgccgatgcccgcaacgcccggaatattatccgaggtatcgccctgaatggccttgatgtcgatgagctgcttcggttccacgccgtacgtctctttgatatacgcctcatcacacagcgtcacggcagactgaccgaatttcgtcgttgcaaggcgcaccgtcgttttcggcgagacaagctgcaggctgtcccggtcgccggtcgcaatcatgcacgtattgtccgtgttttcgcacgtttccgcaaacgtgccgagaatatcgtctgcttcccagccctcgcacgtcacgattttatagccgaggtcgccgagcagttcctttaagaccggcatctgcgccgcaagctccggcggcatgcccttgcgctgcgccttataacccgcataggccttgtggcggaatgtcggcgctttcatatcgaacgcgatggccaccgcgtccggctccgtttcgtccttcactttttccagaatgttcaaaaaaccgacaataccgtttgtaaactcgccgcttttcgttgtcagcagcttaatgccgtaaaacgcgcggtttaaaatgctgttgccgtccagtaccaaaagcttcacgctgatcttcctttccgttacgggtcaaaagacacgtctttgttttctatatacactttctcaagcaatttatcgaggtcgctgagcgtttccagctcgcccgccatgcgccggaattccgccgcaccgcgcagaccgtgcatgtaccacgccacatgctttctcgcttcgcgcatgccgcgcccttctccctttgcggcgcacagcgcatctatatgctttttaatgaccacaatgcgctccgcaagcgtcggtggcggcataatacgcagaccgctgctgaaatagccgttgatctccctgaaaatccatggattaccgagcgccccgcgcccgatcatcaccatgtcgcacccggtttcgctcatcatacgcacggcgtcctgcacgcattttacgtcgccgttgccgatgacgggtaccttaacggcttccttcacctgacggataatatcccaatccgccggcggctcatacatctgtgtgcgcgttctgccgtgcacgcaaatggcgtccacgcccgcgtcttcgcaatattttgcaacctccaccgcgttcacgctgttttcgtcccagcccttacgaattttcaccgtcacgggcaggtcgaccgcatttttcacggcgcggacaatgtccccacacagcggcggctttttcattagggcgctgccgcagttattgcccgcaattttcggcacggggcaacccatattgatatcaataacatccggcccggccgctgcggcgcgctttgcggcagatgcaaagatgagcgggtcgtcaccgaacatctggatggcgacgggatgttccttttcgccaagcgtgatgagctcctgcgtttttttatagttatactgcagcgccctcgtcgagaccatttccgtcacacagtacgctgcgccgaacgagcagcaaagctcgcgaaacggccgatcggtcgcgcccgccatcggcgccagcgccgccacaccgtttaaagtcagatttccgattttcatttttatatccttctgatttttctgtatttttaattttacttatattataataccgaactgccccgcacatttcaataaaaattccttaaaaattagaatttgcctttaatctaccctttatttgtgttatactgagcttaaatatagatgcggggaatctctcttttaaaaaggcgttacacgcctttcgggagaccccctaattgggtctcccgcgcaaaaacagtccaccggactgtttgatagcaatgcgaagcattggtttctcccagtcctgatttttgggaggcaaaaaagttttcgtcgtctgcggacgacgactctgggcttcaccccgagaccccacgaccgaaccgcaggttcggtttgaccttcatttgaaaaaaggtcgatcaaaaacttttaaccacgcttacaagaaacctcattctaaattcacatacaggaggacattcacttggatacctcaaaatcttatgtgcgcgatggtcgcatccagcaaaagccgcgcggcaattatttcctcttctccttccttttcggcctcgctctggcctttgtcatctttgtgccgttcatgatcgtagacggcggccgctttctgttctacggcgatttcaatgtgcagcaggtgccgttctaccgcatcgcgcacgatgccattcgttccggcaacatcggctggaatcatttaacagacctcggcgtcaatttcatcggttcctattcgttctacctgctcggcagcccgttcttctggctcaccattccgttcccgggcgagtggctgcaatacctcatgggcccgctgttcatcttaaagttcggctgcgcctccctctccggctacatttatctgcaccgctatgcaaagaaccccaacacggcgctcttagcgtctctcttatacgcgttctcgggatactcgatctacaatattttcttcaatcatttccacgaagccatcatcgtattccctttgctcttagccgcgctcgatgaatacatgtacacaaagcgccgcggcatttttgcgctcatggtcgccgccgcgtgcatcgtgaattattatttcttcgtcggcatggtgacattcacggtcatctacttctttgtgcgtctgctctccggcagctggcacatcacggtcaaagatttcctcctgctcgcactcgaagccgtgctcggcctcggcatcgcgtgcattctgcttgtgccaagcgttctgtgcatcattcaaaactaccgcgtttccaatcccatcagcggttggagcgccctgctttatgaccgaaaccagcgctacattcacattttgcagtgtctcttcttcccgccggatcttcccgcacgcccgaacttcaccccggattccgaatccaaatgggcgtccctcggcgcgtggctgcccatgttcagcatgaccggcgtcatcggctggatgcagctgaagcgccgccactggctgaaaaagatgctctacgtcctgttcttcatggcattcattcccggtctcaacgctttgttccagctcatgaacgcgtcgtattacgcacgctggttctatatgctcacgctcatgatggccgccgccaccatgatggcgctcgaaaacccgcgtgttgattggcgccgctccttaaagtggacaacgctcatcacgctcgccatgacgctcgtcatcggcctcatgcccacactcaccaaaacggacggcgagattaccgatgtcacgttcggtctcgaaaaataccccacgcgcttctggacatacgccgccattgcgctcctctcacttgcacttgtcggctttgttcttgcattttataaccgcggctcccgcccgttctaccgcgctgcgtccgtctgcctcagcatcaccatcgtgctgtattctgttttcttcatcgcgctcggcaaagcacagtcggattacacttatgaccacatcatcccctacgccttaaacggcggcgcggatgtcgccatagacgacctgcgcgatgacaacgtccgcacagatttctacgaaagcctcgataactccgccatgttctgggaggtacagtccattcaggcgttccacagcatcgtccccggctcgctcatggagttctacgattccatcggcgtgcagcgcgatgtcgcttcccgcccggataccacccactacggcctgcgtggactgacaagcgtcaagtatctttttgacgacgatcacgataccgagtatttcgccggcgaagactacgccgaccccgctatgccgggctggatgtactacggcaacacaaacggcttcgacatttgggaaaacgaatattacattcccatgggcttcacgtacgacagctacgtcaccgaaaaggattacgaaaacacaagcgaaagctaccgcgagcttttgatgctcaagggcattgtcctcaccgataagcaggtttcaaaatggggcgatatgctttctccgctcgatacaagcaaactctcctacaccaaagaaacctacaaaacagattgcgaaaaccgcgcaaagctcacctgcgatacctttgaatatacaaataccggctttaacgccaccatctcagcaagccgcgacgtgcccgtgttcttcagcatcccgtacgaagacggctggtcggcctacgtcaacggcgaaaaggtcgatatcgaaaaggtgaacgtcggcttcatggccatccgcgtcaacgccggcaccaatgtcaagatcgagttcaaataccgcacgcccggcctgttcctcggcgtagcaatcaccgtcgtgtgcgtgcttctgctcgcactgtatatggtactcatgcgcacgatcttcaaagaagtccccgtgccgctcgcccgccacaatatggtgctgcgcccgctctcccactatgcaaaaaagcacggcgcgcattttgaaaacagcggacttattcacgtaaaaccgcgcagtcaaaccgaccgcgctttggaaaagaaagaaggttttgataatgacgactgaacgtaatattccggtcttgtatctcgtcattccttgctacaacgaggaagccgtactgccggagaccaccaagcgtctgaccgaaaaaatgcacaccatgatccgcgccgagcaggtcgatcccgaaagccgcattctctatgtcgatgacggcagcaaggataaaacctgggcgattatctccgaatacgccgaagctattccctatgtggacggcgtaaagctcgcgcacaaccgcggccaccaaaacgctctgctcgccggcctcatgaccgccatgccgctgtgcgactgcgccatcagcatggatgccgatctgcaggatgacatcaacgtcatcgaccgcttcgtcgaaaaatatatggagggctgcgacgtcgtctacggcgtgcgcaacaagcgcgagaccgatacgttcttcaagcgcaccaccgcagaaggcttttataaattcatgaagattctcggcgtagacgtcgtcttcaatcatgccgattaccgtctgatgagccgtcgcgcgctcgagggcctttccgagtataaggaagtcaacctgtttctgcgcggtatcgtgccgctcatcggctttaaaagcgactatgtctattatgaccgcgccgagcgtttcgcgggcgaatccaaataccccttaaaaaagatgatctccttcgcgctcgacggcatcacgtcgttcagtgtaaagcccttaaagctcatctccaacctcggcattctcatctccgttctcagcatcttcggcctcctgtacgcgctcatctcgcacctgtgcggcgtcaccgtcgcgggctggacagccatcgtcgcgtccatctggctgctcggcggtctgcaaatgctctgcctcggcgtcgtcggcggctacatcggcaaaatttacagcgaagtcaagcagcgcccccgctttctcatcgaaacccacctcaaagccgaaccggaagaaaaggtcttggacgaacactgatacgctaaccaaaccggatcccgaattgtctcagcagttcgggatttcttttcccgctgctcacggcatgttgagtttaagaggtacattttatgaaaaaattcgctttcggagcttccaaatttttcctcggctccgttttcggctgcgtttttgtattgctcctgttttttacgcaatgtacatacgccaaaaagcagacatttctgctctcaaacatcgctctgcttctgttcggcatccccctttttgtgctgtttctgtcccttgaccgcctgcaacaggtcaagctttcgtggcatcgtccgaccgtatcgtccgatgtgctcatatactgtctgtgtctgcttttattttccgcacagctctatatttcctataacatttatttcgaaaccggttgggacgcgggcctccttacagaaaacgcccgcaatctgatgcacaagcagtcggtcgatatccgctatttttccaactatcccaataatctgctgtactttttcttcgagctgttcgtcttcaagctgaataaatatttcagcattttctccgatacacagcaggctttgtgcgtcatcaccgtcaactgcgcactcaatacgctttcctgtctgctcgtttataaaaccgccgcgcagctcacacgaaagctatacgcttttttcggcttttttctcgcggtactcagctttgggctttccccgtggaacgtcatctgctacacagacgctttagggctgattttccctatccttacactctatgtattcatccgtccggcaaaatacaaatggctctcctatgtgctttccgccatcatcggcacactcgggtattttatcaagccgcagtgttttattttgcttatcgccgtttttttgattgaaggtatttacgcactgtccgaaaagcacctgttaaaaccgcttctgctctcacttttgacagtcgccatcacctttttcgccgttaaagccggtacagattttctgtgttcccactatcacattcagctcgataacgagcaaagcttcggcattgcacatttctggatgatgggtcttaacccggaaaaaaaaggtgtctattccgccgaagacgttcgctattcccgttcttttgtcaccgcttccgagcgcacgcaggcaaatatcgccgtcggcaaacagcgtttacaggaaatgggctttttcggcacgctcaaacagctcgcgcaaaaaatgctcacgctctataatgacggcacattcgcatggggaaaagagggacatttccttcaaaccgtttttgatccgcccaatacaaaagccgcgcccttcctccgcagcatctactaccccgacggcagccgctacttgtatttcgcaaccttcgagcaattcatttggctcatgatcttgctgcttggcgccgccggtctgttcagcagcttcagtcataagcacgcaaaaaccttaaatatcctgtggctcacttggatcggtctcaccgtctttgagctcctgtttgaagtacgcgcccgttatttatacaccaacgttccgcttttctgcgtgcttgcagccgtcggcatcgaaaatatccgccgcctgttctgccgcatcaccgaaaagctctctgcgcgtcttcccgcaaaaaaatccgtataaccccataacgcacaagacccccgctcccggaaatctccgaaagcgggggtctctatgtttattcggttaccttaggcaaaaaacgattacatcaagcttctgtacagctcggcaatctcctcaacggaggtgtcgcgcgggttgcccgggcagcaagcgtctgcaaatgcgctttctgcgaggaactgtacgtcctcttccttcaggatgcccttcaggttttccggaatacccacatcttcactcagcttcttcacagccgcaatcgttgcatcggcagcctcttcggcggtcatcgcgtcaatgccctcaacgcccatggccttgcctactgcgcgataacgctcgcctgcaacggacttgttgtactcaaggccggtcggcagaatgatggcgcaagccacgccgtgcggggtgtcatacagagcggagagaccgtgtgccatggagtgtacgatgccgaggccgacattcgagaagcccatgcctgcaatgtactgaccgagtgccatgccctctctgccggcttcggtgttctgcaccgcgccgcgcaggttctcggaaatcaggcgaatggcttcaaggtggaacatatcggaaatggtgcaggcgcccttcgtgatgtagccctcaatggcgtgggtcaaagcgtccataccggtcgcagcggtcagacccttcggcatggaggacatcatatccgggtcaacaaccgcgatctccgggatgtcgttcgtgtctacgcagacgaactttctcttcttttccacgtcggtgataacgtagttgattgtcacttccgcagcggtaccggcagtggtcggcacagcaatggtgaacaccgcgtgcttcttcgtcggcgcaacgccctccagagagcgaacgtctgcgaactccgggttctcaatgatgatgccgatggcctttgcggtatccatggaggagccgccgccaatggtcacgatgcagtctgcgccggaaaccttgaaggcctcaacgccgtgctgtacgttctcaatcgtcgggttcggcttgatctcgctgtaaacggaatacgggaagccgaccttgtccagaagatccgtcaccttctgcgtaacgccgaacttcaaaaggtccgggtccgagcaaacaaaagcttttttgtagccgcgcgcctgaagctcctccggaatcttctcaatcgcgcccttgccgtgataagaaattgtgttcaatacgattctgctgaccataaaaaacatctcctaatccccaatacgggaaatttttaactaagttaattatacacctgtccgcacagattgtttgtaacgaaattgtaaatatcagttcaaaaattcttcgttcagttccacgccgaattccttcgcaatggctctcaaattgtcgtctgtaatggtctggcgaattttaccgccgcccgccgtaatagcaagcatataaatttgcgccgccttctcgatcgtgtgcatgaggccaaacgtaatatcgtaatccggtccggaaacgaacaagccgtggtgcgcccaaacggccgcgtcatattttttcatcagctcgctcgtcgccatcgcaatgtctgcgccgcccggcaccatccacggcaccacacccacgccgccggggaacaccaccgggcactccgtggcgctctgccataaagcacgcgtaaagtcgcgcgccgtcagcggcatgatgtacgtcatcgcaatgagattcggcgtgtgcgcgtggtaaatgacacggtaagcgccgttcgtcgccgccttgcgcacactgtggttcataaagtggctcgggaattcgctcgtcgggcgcgcgccgttctcaaggccccacacaatgcgccagctgtcgcccgcatcgttgatctctacaataccgatgttgtgctccgggtcatcctgcacattgcgcaaaaacttgccgctgcccgtcgtgatgaaatattcgccctttaagttatctgcctgcacgcccatgctgttccactcgcgcggcgcggtgaaaaacgggcggcattgctccacttcctccggcttcatgcggtaggtcaggttgccgccgtttcgctcgtgccagccctgctcccagccatccgtgcacatgcggataaaaccgcgtactgcgggaatttccgtcatcatttttatatacctcctcagcgctttaaaagcacttcgttttcgtattttttaatttcagaaagccacgccatgtcgtctgcggggacattctgctccttgcagtattccgcccaaacatcgccgaacggcatcgttttcaactcctccgcgcggatcatcaaagacgtgaaatcctgctcgttctgcagcttcgtcagctcctccgtcggctgcaacagcgcgaacaacagcgccttctgtacattgcggaagcccgtcacccacgcgccgatacggttgatggacgcgtcaaagtaatcgagcgcaatcttaacacgacccgaaagcccgccgcagcgcacaatctctttcgcaatttcctttgtctcgtcgtcaaacagcaccacgtggtcgctgtcccagcgcacaccgcgcgtgatgtgcagcgcaatctccgggaagaacgtcagcatcgccggaattttatcggatacgacctccgtcgggtggtagtggccgttatcgagcagcgggatgcacttatctttattcatcgccgcatagctcagcgcaaattccgcactgcccaccgtgtacgcctccaccccgataccgaacaccttcgattccacacacggcttcacaaggttaaaatcgaacggctcagagagaatctcgtcgagagactctttatacagcatgcgcggcgtcatgcggtcggcgggaatatctttcagtccgtcgcccgtccagatgttcatgatgcacggctgaccgagctcctccgccagatattgcgaaatgcggatacacgccttgccgtgctccacccagaatttgcgcgtctccgggttcgggctcgagagcgtcagcgggtcgcacttcgggtgcgaaaaatacgtcgggttaaaatcgcagccgagcccgcgctccttacagaacttcacccacggcgcaaagtgcttcggctccagcttatctctgtccacccaaccgccgttttcttcggtgaagatcgcgtagctcgcgtgtaaattcagcttcttcgtgccggggcaaaggcgcagcacctcgtcgatgtccgccatcagttcctccggcgtgcgcgcacggccggggtagttgcccgtcgtctgaataccgcccgtcagcggagcattcgggtcgccgtcaaagccgcgcacatcgtcgccctgccagcagtgcagagagaccggcacgcttttcagcgtgttgatggcagcgtcggcgtccacaccgcgctcggcatagcgcttttttgccgcctcatactgtgtcatatcgttcatcctttcctaagcgtgttgatttttgttaaaatgcggtctgccgtctcgtcttttgagagcatcggcaactcctccgtttcgtcttttgtcagcagcgtcaccacgttcgtatcgcccgcaaagcccgcacccttcgtgcgcaggctgttcgccgcgatcatgtcgaggttcttgcgctcgagctttccacgcgcgttttcaatgagattctcggtctccatcgcaaagccgcagaggaactgccccgcgggcttgtgcgcgccgaggtacgccagaatatcctgcgtgcgctcaagctcaatgctcatgccgccgtcatgctttttgatcttctcctcggcgaccgttttcgggcggtaatccgccaccgccgccgctttgatgatgacgtccatcttcggcgcacggctcgtcaccgcgttgaacatgtcttccgcagattccgctttcaccaccgtcacaaacggaggcggttccacggtcatgtttgcgcagacgagcgtcacgtccgcaccgcgcatcgccgcacggcgtgcaagcgcgcagcccattttacctgtcgagtggttcgtgatgaaccgcacggggtcgatcttctccgccgttgcgcccgccgtcacgaggattttctgccccgcaaggtctttctccgcaccgatcgtctgcatgatccagtcaaacagcgttttttcggaaggcatcttgcccgcgcctatatcaccgcaagccaaatacccgctgtccggctcgatcaccgtgtacccgaagcgtctcagttttgcaagattatcctgcacaatggggttcaagaacatattcgtgttcatcgcaggcgaaatcaaaatcgggcagcggcacgccatcacggtcgtcgtcagcatgtcgtccgcaatgccgttcgcaattttgccgatgacattcgcgctcgcgggggcgatgagcacaatgtccgcgcgctttgccagcgcaacgtgctccacgctgtactggaaattgcggtcgaacgtatcgatgaggcacttgttgcccgtcaaagtctcaaatgtaatggggttgataaaattcgtggcgttctgcgtcatcagcaccgtaatatccgcgtgctgctttttcagcatactcgcaagccccgcaattttgtacgccgcaatactgcccgtcacgcccagtaaaaccgttttacctttcagcattttatcgtcctttccgttttgtttttactctattataatacacttttcagggttcgtaaattttaatttcaaagctgtcccgtatcacgttgcgcgcctgctgtacgctcgcaagctcgccgtccgcgatcatctgcacgatgagattaccgatggccgtgccctctgtcgggcccgcatatacaggtaatttgcaagctttcgccgtgagtttattcaaatattcgtcccggctgccgccgccgacgatatttaaactcgtatatactttgcccgtcagcttttcaagtgcctttatcgtctcggcgtagctttccgccagactgtggtatacacaggagagcatctccggcactgtcggttctttgaagccctgtttcataagctcgtttttcaccgcttcgcacatgcttttcggcgccaaaaagcactctgcgttcacgtccacacggcccttataatccgccgcgctctgcgcaagctccgtcaacttatcaaagctgttctcttcgccgagctcctgccgcatgttctgcagcatccaaaggcccatgatgtttttcaaataccgatagcggtactcatacccgccctcgttcgtaaaattctgcgcacggctctcgtcgttcgtcaccggcgctttcagctccacgccaatgaggctccacgtgccgctcgaaaggaacaccgcattctcatccttcgccggcaccgccaaaaacgcagaagccgtgtcgtgcgaagccgcaagccgcaccgtcaaatcaaaaccgaccttctccttcacgcgctctgtcagcccgccgagcgcttcacccggcttgtgcagctcgccgaagattttctccggcaaacccacccgcgctatgatctccttgtcccatgtcttatgttctgccgagaccatcgccgtcgtgctcgcatttgtgtattcgttcacggccacgcccgaaagcctgtatgccagataatccgggatcatcaaaagcttttcggccttttcaaatacatccggcatttcttttttctgcgccgccagctgatacaccgtgttgaacttctgcatctgaatgcccgttcttccgtacagccacgcaaacggcaccgttttttccagctcgtccggcaccgtctccgtgcggctgtcgcggtacgccaccgccgggcagatgcgttctccgtttttaccgagcaaaacataatccactgcccacgtgtccaccgccacgctctcgggcgcggtctcacacgccgcaatgccgttgatcacttcgctttcaaggcggtcaatgtcccagcacaaatggccgttttggtcttccgccccgtttttaaaacggtagatttctttcagcttcagtttttcgtcctcgagccaccccaaaatgtgccgcccgcttgaagccccaatgtccaccgccaaatacgttttcatataagccctccgttttttcgtttacagcaatagtatagcaggaaccgtgtccaaaaataaggacgttgttttcacttaaaactatctttattttaacttttctgccgcacaaaattttctcccgccaaactgcacaaatccgcgcttcacttttcggcacacagcaaaagaattccgccgaaataggttgacaatccaaggctttcaagctaaaatgaacacataaattgtacatacaacttctgaggagagatcaggtctatggcaaaacaggcaaaactcaccattgaaaaggatttccaaatttctaaaatcgataagcgcatctacggctcattcatcgagcacctcggccgtgcagtatacggcggcatctggcagccgggccaccccactgccgatgaagacggcttccgccgcgacgtactcgacctcgtgcgcgagctgcaagtgccgatcgtccgttaccccggcggcaacttcgtctccaatttctactgggaagacagcgtaggccccgtagaagaccgcccgaagcgtcttgagcttgcatggcgcagcacagagccgaactatatcggcatcaacgagttcgcaaagtgggcgaaaaaagccgacacgcagatcatgcaggccgtcaacctcggcacacgcggcattgaagcagcgtgcaacctgctcgaatactgcaaccacccgtccggcaccaaatacagcgacctgcgcgtcaagcacggtgtcaaagacccgcacaacatcaaggtctggtgcctcggcaacgaaatggacggcccgtggcaaaccggccacaagaccgccgacgaatacggccaccttgccgatgagaccgccaaagccatgaagcagatcgatccatccatcgagctcgtgctctgcggcagctccaatacgggcatgcccacattcccggagtgggaaaacaccgcgctttcctgggcgtatgacagtgtcgattacatctctctgcaccagtactacggaaaccgcttcaacgatatcgcaaacttcctcgcccagagcgacgacatggatcacttcatccgtaccgtcatcgccacgtgcgatttcgtcaaggcgaagaagcgcgcaaagaaaaacatcaacctcagcttcgacgaatggaacgtctggttccacgccgatgcctccgatgccgacaccatgaagaaccgcccgtggcagatcgcgccgcacctgctcgaagaccactacgattttgaagacgccctgctcgtcggcctcatgctcatcacgctgatgaagcactccgaccgcgtaaaaatggcgtgcatggcacagctcgtcaacgtcatcgcgcccatcatgaccgaagaaaacggccccgtatggtgccagacgatttattatccgctgctccacgcctccaaatacggccgcggcattgcgctccagccggtgctcacctccacaaagcacgataccatcgatttcaccgatgtcaccgacgtcgagtccatcgccgtgtggaacgacgaaaaggacgaagttaccgtcttcgccgtcaaccgcagcctgacggatgacatcgtcctcgacctcgacctgcgctccttcggcgattaccgcctcgcagagcacatcgtccttgaaaacccggatatgaaggccgtcaacaccgccgagcacagcgccgtcatcccgaagctccatacggacagaaccgaaaaagacggcaatttctataaagcgaacctcacgaaaacctcgtggaatgttttgagattcgtgaagtaaaccgagcttccgaaaagcgtagttaaaagtttcgcccgccttttcaaaggcggcaagttcttagaaataaagcaacgccgcaccctcgttttcctcatcgagcgtgcggcgttattttatgcgtactaacctctctgcctcaaccgatactcccttggtgtcacgccgtacatttccgaaaacgccctgtaaaaatagcttgtattctcataccccaccgccatgataatatcgctcacggaaagcttcgtgccggaaagcagcgccgccgctttctccattcgcttgcgccgcaaaagcgatttaaacgtgaaccccgtcgtgctgtgtaccgccgcgctgaggtacgaaatcgtcacaccgtacttttccgcaatgtccgtcaagctcgccgtgcggtaattttcttcaatctcccgcagcgccgtcatcacaagtgcgctgtgatcgccctcgttttcgctcgccgccagcttatccgtgcagttcaaaagctccaaaaacagcagcgccatcgtgttctgcgtaatgcgtctgcggtttttcgtgtcgttcacaagcgtccaaacgaggttttcaacgagattctgcaccggcagcacatccgcaactctaaacagtaaaaaatccgagccccccgcgcggctgatgctgttcgcgatgaaccgcccaagcgcgttgtccgcgccgatgcgctccagcgccgtatcaaagaactgcggcagcacaataaaattcaccgcaatgtcctcatattccgcacgttctatctcatgcgaagcgccgcgccccaaaaacagcagctcgcccgcatgtacggtgatgggctcgccgccgttgatgcggtgcaccgtcttgccggagcacatgtacatgatttcaatatagctgtgcgcgtgtctggggaacggtgcaaaccgcgtgtgcgcgcgcacggagatgagccgcccgcgctccaaaagcttctcgctgtccaccgtaaacaccgcccgcgccgtgtacgccgccttgtccaccgcgccgccgtccaaaatgcgctgttcctccggcgtgatgacccgtagcctgcgcatgagttcctcggtcatttagaggatcagctcgctttcgtagtatttttcctgaaaatcgagaattttcaggatttcctccgccgtgtaaacgccggtcttttccgccgccacccacttgtcttccacgtcgttaaagcgatgcaccactgcgatcaccacgccgtcaaaggttttaaacggctccgtcggacccaaaatgtacacgtcctgctcggcgttatcccccgccatcacgcccggcacatagccgtagttcacggggtagatcatctccgggtagcgcgggtgcgcagagccaagcggcctgtccgtcacgcagtgtacgggctttccgagcacatttttgtaatcctcccgcgtcctgtgcagcgcatttaggcgcgcatcttctttttcccgccacgcttcgcgggtaagcttctctccgtccaccgtaatctctttcacgccgttgttttcaaaaaacatcaccgcagcgctttccaccgcttccgcacgctcggtggaaaattcaccgaagtccgtcacaacttccgccgtatcacccttttcggtgcagatcaccgtgccgtattcgtttttatatttcttgtgtaccgcgcgccagccgttcgccaaaggcatcatcaaaagcgtcggtgtctttttctccttaaaaatcatgcgttttcctcgctaaaattcaagatgagctccaccgggcaatggtcgctgcccatcacgtcggagaggatcttgctgtccgccaaattctttttcagctcctccgtgatgaggaaatagtcaatgcgccagccgacgttcttttctcttgccttgcccatatacgaccaccaggaatacgcgtcctttgcatcggggtacaattcgcggaacgaatccacaaaacccgccgcgagcagttcggaaaacttccctctttcttcgtacgaaaatcccgcgctgccgatgttcggctttgcgtttttgatgtcgatgcgcctgtgtgccacattcatgtcaccgcacacaataaccggcttcgtttcgtgcagcctttcgagatacgcgcggaacttatcctcaaacgccatgcgaaaatcaatgcgcacaagctctttttgagcgttcggcgtgtacacggtcacaaggtaaaactccgggaattccgcgcagatcacgcgcccctcgcagtcaaactgttcgtcgccgatgccatacgtcacattaagcggctccgtttttgtaaagattgccgtgccggcgtacccttttttctcggcagagttccaaaattccgtgtaccccgcaaaatcaaaatccgcctgctcgcgctgcattttcgtttcctgcaagcagataacatccgggtcttccgccgctaaaaagtcattaaagccctttgtcatgcaggcgcgcaacccgtttacgttccaagaaatcaacttcaaagcaaaatcacttccaatttcaaattaaatatggtatactgaattttacgaacggtctttcttcccgaaagacctctatgaaaggagttattcggtatgcagaatcctattgttactttcgagaccacccgcggcaccatcaaggcggagctttaccccgagattgcgccgaacacggtcaacaactttatttccctcattcagaagggcttttatgacggcaccatcttccaccgcgtcatccctggcttcatgatccagggcggcgacccggaaggcaccggcatgggcggccccggctacggcatcaagggtgagttcgctatgaacggcttcaagaacgatctgaagcacaccaccggcgttctctccatggcaagaagccagcgcccgaacagcgcaggcagccagttcttcatcatggtcaatgacgccccccatctcgacggccagtatgccgcattcggcaaggtcaccgagggcatcgatgtcgcacaggccatcgtttcctccccgcgcgattggtccgaccgaccgcgcgaagatcaggtcatgacgaaagtcaccgtcgagaccttcggcgttgattacgacgagcccgtcaccggccccgagcgcggctgattttaaccgcaaacgttaaaaccgaacacacagaaaccgtaccttttcaggtgcggttttttgttttactctacccttgccagtacaagcgagcattcttctgttttctcgtcgccgtagcggaacgccccgtgcagcacgctttccgcgtcgcggcacttttctgcgctcgcaccgtacagctcggcgatcacctcgcctttttgtactgcgtcgcccaccgtctttttcagcacgatgcccgcgccgtagtcgagcacatcgtcggccttctcgcgtccggcgccgagccgcacgcttgccatgcccacctgctccgcgttgatatgcaccacatacccgctgcgcggcgcgcacacgtcttttttcaccggcgaaagcgcaaaccgctcgggttctctcaagtaccgcacatccgcgccctgcgcctcggccatttcgcagaatttctcaaacgctttgcccgtctccagtgccgttttcgctttcttccgcgcgtgttcaaggctctccgcctgctcgccgagccagatcatgtttgccgcaagctccaaacactcttccgtaaggtcttccggcccgcgtccgtgcagcgtctccaaaacttccagcacctccaaggtgttgcccacggcgtgcccaagcggcctgtccatatcggtgatgagcgccgctgcgcgcctgccggaaagcttcgcgatctccaccatttcctcggcgagcgtaatcgcgtcctccgttgtcttcataaaggcgccgctgcccgtcttcacgtccagcaaaatacgctctgcgccggaggcgatcttcttgctcatgatgctcgaagcgatgagcggcacgctctccaccgtcccggtcacgtcgcgcagcgcgtaaagcttcttgtccgccgggcacagctcgcccgtctgtccgatcatcgcgcacccgatcttattgatctgcgctgtaaattcttccggagaaagatcgatccgcataccgggaatgctctcaagcttatccgtcgtgccgcccgtgtgtccaagcccgcggccgctcatcttggcaatcttcaccccgcacgccgcgcaaacaggcacaataaccatgctcgtcttgtcacccacgccgcccgtggaatgcttatctaccgtcacgccgtgtatcgcggaaaggtcggccatgtcgccggaatgcgccatcgccaaggtcagctccgccgtctcctcgtgcgtcatgccgtttaaataaatcgccatcaaaagcgccgaaagctgatagtccgggatactcccgtctgtgcacccgcgcacaaaatattcaatctcgtcctttgtcagcgtcccgccgtcccgctttttgcggataatgtccaaaatatgcagcacaaaaatcaccgccttttttaccgcttcgctttttcgcccagaacgtctctcggcgaaaagctctgcggcagcaaatcctttaatgtataaaccttttcttcaccgggctttgcaagaatgatcacaaacgcgtccccgcaaaactcccgcatcacctgcctgcacacgccgcacggcgcgcagaagtcttcgggctcctcgcccgccttgccgcccgcgattgcaacagcgacgaaatctcgctcgccctttgcaatcgccgtgaaaaacgccgtgcgctccgcacagttcgtcggcgtaaacgcagcgttttcaatgttcacgcccgtgtatatttcaccgcttttcgcaagcagcgccgcgcccaccgcaaagccggagtacgggcagtacgcctttttccgcacatcaagcgccgcttccgaaagcttttttatgacctcacttgtcatgtccgtccaccgcctcagaggcaaccgccagcgctacctccatcatctgcgtgaacgtcttctgtctctcttcgctcgaggtcgattcccccttcagcggcaagtcggataccgtcgtgatggaaagcgcctgcttgcccgcgcgcgccgccgtcatatacagcgccgccgtctccatttccacggccagaacgcccatttttttccattcggcggtctcattttcacagtcgccgtagaaaatatcgctcgtcaccacgttgccgacgcgataacgtaaattcttctcccgcgccgtctgcaccgctttttcaagcagttcaaagcttgccgtcggcgcaaatgtgcccggcaaacggtactggtgcgcaaagttcgagtccgtgcacgcgcccatcgccaatactaaatcgcgcagctccacgccgtccgcaatgccgcccgccgtaccgatacgaatgatcgcttccacatcgtagcaatgatacagctcgtagctgtatatgcccatagaaggcatacccatgccgctgcccattacggaaacacgcttgccgttatacaagcccgtatagcccagcattccgcgcaccgtattaaagcacacggcattttccaaaaacgtctccgcaataaatttcgccctgagcgggtcgcccggcatcaaaaccacctttgcaatatcgcccttttttgcttcgttatgcggtgtcaccaaattttcctcccgaattcaaatttcaaatcatgcaaaatgcgtttcgccgtctttataataaacttcactgcattccggcgtctcaaaaacgtgcaccaaaccctcaaagctttccaccgtccggtgctcgaaaagctcttcccgcggcagccagaacgcatcgccttcttcggagccgtgcagctcgcccgtaaatttatccgcgcggaacaaaaacacaatgtaccgcacgccgttatcaagccagaactgcttcacaccgcacagcgtcggattttcaatcgtcagcccggtctcttcacggatttcgcgaatgaccgatgccgcgatggattcccccgcttccacgtgcccgcccgggtaaacgatacccgaccagttcgggtcaagacggttctgcacgagtacgttgcccttgccgtcctccaccatgcacatgtttgtcagctccaccgtttcttttctgcccatttttctcactccccaaatagcacaatgccgcgcagaacaaaccctcatttcctgcgcggcaccgttattattagaatttacacaatgcccgcttttgtgatggcctcaagctccgcacgcgtcggcagaccctcattgtcgccccggtgtgtaatctgtatcgagccgattaccgtgccgcgcgccgcagcctcctgcaaggacatgccctccgccacagcggagaggacgcccgccgcaaagccgtcgcccgcgccaaccgtgtccacaattcttttcaccgggaatgccggcaccgtgccgtgctcgccgcccgtggaccagtacgcgcccttgtcgcccagcttcacaatcacgctgtctacgccgcgctcgtggtaaaactccgcaataccctccggcgtgtcacgctttgtgagaattttgccctcactaaggcccggcaaaacgaggtccgcttcctgtgcgaggctgttcagcgtgcgcaccatctctttttcatccttccaaagctgcgggcgcaggttcgggtcaaacgaaataaacatatccagcgccttcgcgcggctcatcaatcgtttcaccgcgtccaatgccgacttcgacaccgccggaaaaatacccgtcacgtgcaggaaatcacatccgtataagtcgagcttatcgatgtcatgcgtcgagatctgcgaagccgcgctgttccgtctgaaatacgcgatcttcgggtcgcccgcctcggtcctgcctttcatcataaacccggtcgaagccgtgtccgtcacggtcacaagcgcgtcggaaacgtggttgcctttcatgctctttaaaatgcgtttgcccaccgggtcgtcaccgaggcgtgtgcagtacagcgcttcatggtcaaggcgggaaagtcccaccgccacgttatattccgcaccggccacggccgccgaaaagtgtgtcacatcctccagctcgccgagctcctccgcgatgaaaagccccatcggttcgccgaccagcacaatgcgcccgcgcacctcgtcctccggctcgtccgcagctttctgcaattcggcttcgtctacaaactccatcttcatagcgttttcccttttaaaccgtcgtcttcaccaccgtgcagtggccattaatcttaatttttccgctgccggccggtacaaacaagctgtccgccggcttgaactccacttcgttctcgctgccgacaaccttgccgctgccctccgtcacaacaagcgacgcaaacgaatcgcccgtcacatcaatttcgacttcgccgtccacaacatatttctccgtcgtaaagtacgggcaggaagccagcgcgcactttgtgcctccgggaatctcctccggcttgccctgcttgtcggacgtgtcgctcggggtcagcttggaaacgtcaatggccttatcaatatgcagttcacgcagcttgccgtccgcaccgcggcggccgtagtcgtacacgcggtatgtcgtgttggaattctgctgaatttcgcaaatgagaattcccgcgccgattgcgtggatcgtaccggactgaatgaagaacacgtcgcccttcttcacgtcggccttgtagagcacatccgtcagcgtgttgtcttcaatgcgctttttgaattcctctttcgtcagcgcacggttcacgccgaagtacagcgaagcacccggctcgcagtccacaacgtaccacatctcggtcttgccgtattcaccctccacgcgcagcgcatattcatcgctcgggtgcacctgcacggaaagcggctgcttcgcatcgatgaacttgataagcaccgggaactccttaaacttcgcaccgttcacaccgagcgccttcgcaccgactttttccagatactcgccgaatttcagcccgtcgtattcaccgccgtctatcacgctctggcccgccgggtgcgtagaaagctcccagctctccgcaaccttttcatagtcgcactttttgccgtaaacgtcgcgcagctttgtgccgccccacagatagtccttaaatgccggggatagtttctcaatcttcatattcattcgttcctttcaaactgttttatatcaaaatttatcgtcttgtcgattctttctcgtgcagcggcatatcgagcacaagcggctgctccgggtcgctgctgcgcagcatgtggatgagcttattcgccgcggctctgcccatctccaccttcgggtgcacaaaagaggtaatcttcaccggcgagtattccgaaatgctcgaatcgtcaaacccgatgacgagcacatcctcgggcacgcgcacattgtgcttctgtaagaggtcaatcaccccatacgcaatctggtcgttgtagcacacaatgccgtcacacccgcgcaggcgctcaaacatgtagtcgctgttatcggggcgaaaaagcctgctgcgctcggccgtcgtgtaccaaaccacattgtcgtcgccaaggacgcatccgttgtggataagcccctcggaaaagcccgcgtagcgcccgtggccctgcatgtcgtcagatttaaacacgccgccgatacgtctgcaccccttttcaatcaagaggtcgaccgcctgcaagccggccttgcggtcgtccgtcaccacgtaaacggaatcgggtaaatcgcggtaatagctgttgaaaaacaccaccggcacgcccattttttcaagcctgcggtaaagctccacgttcgggttcgggaacgccgtcttcgtgccctccacaatcactccgtccacgcggcgggagatgagcgactgcaaaatgcgcgcttcctcctccacgtggttgttcgtcacattcagggtcaaatcgtagcccgcgttcgtcagcgtctcctcaatgccgcgaatgatcgtcggaaaaatatagtcggaaatatacgtcgtcacaatggcgatgctgttgccgcgcggcgtgcgtcggctctcggagctgatatacgtgccgctgccgcgtctgcgttcaatgagcccctcctgctcgaggacggaaagcgcctgccgcacagtttggcggctgtacccgaactgctcggaaagcgtgttttcagattccatgcgttcgccgggctcatattcgccgtttttgatcttctccttgatggtatccaccagaaagcgatatttcgcagttttcttttctgtgtctgccatgtcatcgttcctttcaaaaaggatacctgtttgcacaggttcaatacaaccttattataaaaagccgtacaactttttgcaatacctttcgcaaaatttgtacggacttattttcaagatattttgcaaaagcaccggaaaatacgaaaattttgaagaaaaacgccgccgcacagcccaaaaagccatgcagcggcaaacattccatttcttcactttcagccgagcatcgcattgatttccgcaagcacacgctcatacgcttcgttcagctttgcggcttcctcttccgtgccgtccagcttcgccgtttcgtactcttcaagcagctccgcagcatcctgctgcaaacggtcaagcgtatctgcgcttacagctttttcgatctccgtctcgacttcctgctgttccgtcaagccctgcgcccaatcagtcttggtgtccgcttctgtctgacgcactgcggtagcattcatggcatccgggtcggtcacgttcgcctccgttttcggcggcacagtacacgcggtcagcaatcccatcagtaaaacaagtaaaattacaacggttcttttcatagcaaattctcccttcctcattgtaccggaatcgcttatcttaaaaccatcggactcaactcctttatttaactaaagtatactgtattcaagtctttttgtcaataattttgcacagatttatccgcataatccctacgtttttgtgtttttagtctttgcctctcattcgtacttttttccctctgtccagcataaaaaggcggcattgccgcctttcgggagaccccctaattgggtctcccacgtgcaaacagtccactgggctgtttgcactcccatcctgatttcttatcggcaaaaagtgtttcgtcgtctacggacgaccaagggtttcacccttggaacctgacaagcttttgaaaaagcttgtgcaaaactttattcgcccgtttgcacgcaactacacagaaaaaccgccgtgcggaaaaactcccacacggcggctctgatttatcaaatttcgcccgttttattccacggtcaggtcaaacttaaacgtgaacgtctcgtcgtcaaactgcatcgccttcgcaaggcgcggaccgcagctgttggagcctacgccgctcatcttgcagtcgaagcagaacacattgtcggggctttccgtaagctcgtaattgtgcatcttctccgtcatttcctcctgcgtgtagtgcgaaaggttgaacgagaagtcctccgggctcgtcacggtcacagcgcccgcgccatccgtgatcgtcacccgcgcacagccgaagtggctgccgttctcctgcggcttcacgtaatcctcaaaaaggtcgtccgccgtctgcgcaaagtgacccagcgaagacgcatggtgcttgtcgcagtacgattcatacgggccgtagccgtaatattccgccgtgtcaaacgacttcggcaggaacattctaaggccgaatctcggcaggaacggacgctccatgtcgcgcttaccgttgatctccgctcttaccttgccctcggcgtccaccgtaaagcggcagtcaaggtgcaggaacggtctgcggtacaccgccgcaaggctcagcttgcaatcgatcacaacaacgccgtcttcctctttcgcgttgcaggcatagacttttatcgcgggttcgttgtagccggcctgctcccattccttgcgcacaaactggtcgttgtccgtcggtgcacgccacacgttccacgtcatcgggcgggtcatgatgttcacattgttcttcaccatagacgtaaacacgccctcggtcttcgagaacacataacggaagctgtcgcccgtcaccgtcacggcgcggctgtcctccaccgcaacaacaaagccctttctaagcgcttcttccttgcgtgccccgcgggaaacgatcagctggtcaaagccgagcgggtgtcccttctcaaagaacacgctgtcgttcttcttcgcgctgtactgcagaagcaccgccacgtcgccctccgtcggaattgcatccggcagcgtaatgacgccgctttcgtgcggggcaatcttgatgtcgtccatcacgccgcaggccaccgtatcgccgtcctgctgaatttcccaggaaagcgtcaaaaattcttccgtgttcgtaaaatcgcggtaattcgtcagctgaatttcccccgtttcgcggttcacaagcgccgcgcgcaccgggcgaatgacgtttttatattcgagtaaacccgtatgcggtgtacggtcggggtacacaaggccgtccatgcagaagttgccgtcgtgcggatattcgccaaaatcgccgccgtagcggaaaatatcgcggttgtcgggcgtcgtaccgccgtaaacggcgtggtcgcaccattcccaaacaaagccgcccataaagcggtcatacttcatgataagctgctggtactgctccgcatctccggggccgttacccatcgcgtggatgtactcgcaaagcaccaagggcttcgtgtacttcgggtcgaccatatattcatcaatccactccggcgccgagtacatgcggctctccgtcgtcagggaagacaggtcgttcttgtggccgcgcgcatcgtaatacgtgttctcgtagtgcgtcaagcgggacgggtcatattcgcgcacccatgcgccggccttctcaaagctcgggccccagccggtctcattgccgtaagaccacatcagcacgcacgcgttattcttgtcgcggatgacgctgcgctgaattctgtccataatcgccttgtcgaaaatcgggttcagtgcattgtccgcgtattcgtccatgccgtagccgccggtctgcgccgccgcaccgtggccctcaatgtccgcctcggcaataacatagaagccgtattcgctgcaaagctgtaagaaccacggcgcgttcgggtagtggcttgtgcgcactgcgttgatgttatgctgcttcatcaggaacaggtcgcgcttcgcctgctcgcggctgatggtgtagcccgtcaccgggtcgctgtcatggcggttcacgccgcgcaatttgattttcacattgttgaaatacagaacgctgtcgcggatctcaattttggagatgcccaccttctgctcgatcacttcatccgccgtgcggaacacgatcgtgtactggtacgggtcctcggcattccaaagatgcgggttttcgagcgcaaagttcggctccgcgcccgccgtgctttcgagcagagcgccctcggcgtcatacagctccgccgtcacgtccggcagcccgataaagtccatctccacgcggatatccgcatgggaaaggtcatcgctcaccgtcgtctttacaaagtaatcgcggatgtgcgccaaaggtctgcgaatgaggtacacgtcacggaaaataccgctcatgcgcagcttatcctggtcctccaggtacgagccgtcacaccactttacaaccagcaccgccacggagttttcaccctcgttcagtaaatcggtgatgtcaaactcgctcgtcgagtgcgaaacctggctgtaccctgcaaactgctcgttgatccacagatagaagcaggagtccacgccctcaaagttcaaataaattttctgcgtcaggtcttccgcgttcatgtagaagcggcgcagataaagaccgcaggggttctcgtccggcacatacggcgggtcatacgggaacggatagcgcacgttcgtgtactggtggcggtcatagcccgcattttgccagcaggacggcacctcaatctcgtccatatcctcctcgtcaaagcagatctcaccctcggagccctccgggaacacgtctaaaaacgagtcaaaataccgaaacgaccatgtgccgttcaaaaggcacactcttgtggattcttccccgtcctccggtgcctttggcaagaagtagctgcggttttggcaggtacccacgtgcagcacgtccggattttcgtgcattttctgaaattccattatcaataccgttcctttcctgcgtgaaaacgttttccacgcgtgtgttgaaacactccaaaattcagttgaagcgatttagaacctatgctataatgagcgtacacagatggggattttccgcatcccctctgctacaagattacatgaaaaaaaggtgcgggtcaagcccgtaaccaaataaattttgagaaaggaacaaaaaccatgacgatacaaattctgctcgccgccctgttccttgcggcagtgctgtggctcggctttcgtgccgcgccggaaacggagggcgcccccgtccgccgcgcccgtataaaggaagctacggtcttcggcctgccccccgtacccgtcttctgcgccgtgctcgctttagggcttatcctgcgctttattctgggctacaacatcaacgggttcgaggccgacatctcctgctttaaagcgtgggccgcctatacgcacgattacggctttaataacatgtattaccgggacttcttcctcgattatccccccggctatctctacgtgctctacatcatcgaggcgttccgccgcctgttcggtgtcgatcaatacgcgcagagctatacgctcatgataaagctcgcgcccattttgtcggacatcgcctgcgccgcggcactttgggtacttgcccgcaaaaagctcggtgaaaaaagcgcactccttattgcgtttgcctatcttttctgccccgccgtcatcgtcaattcctccgtctggggtcaggccgatagcttctgcgcgcttctgctcctctgcacactgctgcttctctggtacaaccacacgccgctcgccgcgttcgtctacggcttcggcatcttaagtaagccgcagatgctcattttcgcaccggtgctcattttctgggtcatccgcaaaaaggactggaaaaacctcgtcctcgggcccatcatcgcccttgtgacgattctcctgttctccacaccgtttataaagaatttcgattacctgaagctcatcgaaatctacaccggcaccatcgattattataattactacaccatcaacgcctataacgtctgggcactcttcgggctcaactgggctgccctgccggaacacagcacttggctgcaattcggcgtgccgctcgcaaccgtcctcgcaggcctcttactgctgaaatcgaagcgcgacgacgccgttttcgcctgccccaccgttttgatgttcacggtctacattttctgcgtcaaaatgcacgagcgttatctgttccccgtgctcctgtgcctgctgctcacctacgttttcacaaaggaaaagcgcttcctgctcctgttcgcgggcacatccacggtgcattttttgaacgttgcctatgtgttgtacctcaataacgcctacatttcccccacgtccattcaaatcctgttcctctccgcgctgcatgtgctcctgtacatttatatgctctatatcacgtaccgctgctttatttccgaaaaagccctgcgcccgctccctgcgtttaaaacgcagaaagccgcctcggccgagcagcacacaaagcccgccgcagcgcccgaattctccctcatcaccgacaagaatcataacgtccgcctgacgcgtgtcgatcttctctgcatcgccgtcgttaccctcctttacggcatcgtcgcgttcacgaatctcggtgatcacgagaccgccaataccacatggacgcctcaaaacggcaaatccgccgtctttgagaccgacgacgcgtacagcgaaattttctacctgcccggcatcgcccctgcggataacggcatcggccagcgcgtcggcaccaatatgaagattgaggtttcaaacaatcaaaccaactggacgaccgccgccgaaaacacggacggcagcgtctatgcgtggaaaaacgtctccgtcgccgccgtcggcaaatatatccgcatcacatcgatgtgcgacgacctcgccatcaacgagttcgcgctcaaaaagacagacggcaccggctttgcaacgctcaccgccgtctccggcaacgcgtggcagctcacggatgagcaaaacaccgtcccgctttatccaagctacatgaactccacctatttcgacgaaatctaccacgcccgcaccgcctacgagcacattttgggactcgagccatacgaaaacacgcaccccacgctcggcaagctcatcatctcggtcggcattcgcatcttcggcatgaacccgttcggctggcgcttcatgggcacgctgttcggtgttctgatgctccctgcgctctaccatttcttaaagcgcctctttggctccacgttcctctgcaccgccggtaccgtcctctttgcgttcgatttcatgcactacgtccaaacacgcatcgcgaccatcgatacctacgccgtgttcttcatcattttaatgtacgacgccatgctcgtgtttattcagcacgatttaaaaaccgacagcttcaaaaagctcctgcccccgctgcttttaagcggcatcttcatggggctcggcatcgcaagcaagtggacggtcgcctatggcgcagtcggcctcgccgtgctgttcttcggcaagctcatcgtctcttaccgcgaagagaaaggccacgccgccgtgcagaaagcgctccttaataaatccataaagctctgcctctggtgctgcctgctgttcatcgccattccgttcggcatctactttacggcgttcctgccgctcaccacattgccgcataaccgctacgatgttttcggccggttcatcgcgtaccaaacgcatatgtataattaccactccacgctgcaggcgacccatccgtttgagtccccgtggtatcaatggccgttcgacatccgcaacgtatggtactacggcaattacagcgccgacagcgagggccacatccgcaccatttcggtgctcggcaacccgctgttcttctgggcgtgcgtgcccgccaccgtgtacgcgttcgtaagggccgtaaaacggcactcccgtaccgcgctcatctgtgtcatcggcttcttgtccgcgtatctgccgtgggtactcgtgccgcgctgcacgttcatttaccactatttcactgccgtgccgtttattctcatcgcgctcctcatcgcgtatcagcgccttgaagaaacagcttccctgcgccgcgtcgtcttcacaaaaggcgccgtcacgctcacagtcggcagaattctcctgcttgcctgcgtcctcgtgcacattcttatgttcatcgcgttctaccccgtgctcaccggtaccctcaccacgcagaactacgccaacgctttagaatggctccccagctggttttttatctaacgtaaaccacagtatatataaaaagggcggcacaaagccgcccttcaagaacccccttgatagggtttcttacgaagaaccgtcccccggacggttcttctattttcctgatcttgcgtttggcaaaagtatttcgagctctgcggagctcgaccaaaggccttgcctttggaatccacgaccttttgaaaaaggtcgtcgaaaactttatttgcccgctctatttcagctcacttaccccttcaccgactccgtcgccgccgcactgttcaccggcttatcgaggttcttaatctccttgttgtagagaattacaaagaatacaaccgtcacaatgagcgaaataaattcggagattgggaagcagaaccacacagcgccgaggctgattttcgagagcagccacgccgccggcaccagcacaaccagctgacgcatcacagactgcacaaggctgtacatgccgtggcccgtcgcctgaaacagcgtcgaaagcgcaatgccgatcgccgccatcgggaagtggatcgcgatgattctaagcgccgagtcgccgatctcgtgcagctccggcgtcgcgttgaagatggaaatcagcgtgcccgggcagatttcaaacacgataagacccgcaatctcaataataagcgcaatcacgcagccgatcttcaccgcacccgtcacacgcttcttgtcgcgcgcaccgtagttgtagcccataatcggcatgagcccctgcgtcaagccgaacaccggcataaacacaaaggactgcaatttaaagtaaacaccgaacacattcacggccactgcggaaaatcctgccaaaatgccgttcattgccatggtcatcagcgtgccgatggcgttcatcacgatgctcggcagacccacaacgtaaatgtccttcatcgtcttgccgtggaaacggaagcccttaaattccagcgcaatcgcgtggttgccgaaaaacaaaatgcaaaggcccacaatcatcgaaaggatctggccgccaaccgtcgcatacgccgcaccggccacgcccatgttgaagttgaaaatgagaatcgggtcaaagatgatgtttgccaccgcgcccacaagctgaatgatcatcggcatcaccatgttgcccgtcgcctgtaacattttttcaatgaccgccgcaaagaagaagccgaacgatgctaccgtcacaatcgtgatgtatgtcgtgcccatgctgagcacttccgcgtcctgcgtgtaaagcgccgtaaacggacgcgccacaatcgcaccgaaaaccgcaaagaccacatacgtgatcgcggaaagaataatgccgtgcgtcgccgcgttgtccgccgcctcctggtcgcgctcgccgagtctgcgggaaatgagtgagctcacgcccacgccggtgcccacgccgaatgccaccaacaggttctgaatcgggaatgccagcgagaccgccgtcagtgcattctggctcacctgcgccacaaagtagctgtccacaatgttgtaaagcgcctgaatcagcatcgagaacattgccggcagtgccatcgtcaaaatcagcggcagcatcttcgcagagcccatgcggttgtttgccgggtcctcaagctttaccgttttttccgccataaaatcaaacttcctttcttttttgtaaattcttttgcaaatctctacgctccaaacgcggttttttcgcatgaaaagacttcgccgcaagcacggcgaagtacgctgtttaaagcctttagttttcattctgtccgaccgttatcctgttcaacagtctaaaatcgaactgatacagtataacacactttatttttcaccgcaacacttcgcataaaaacgcgcattttcaccaattccgcgctccaaaacaagccctatcgtcacagaatattcaccttttgttcttgcattcgacgcaataaatcggtacaataaatacaaactggtcatactctgcacaaacaggggatttccgggaggaaacggggtcgcttttcgccccgcaatattgaaataaggaaggtagaaatttatggcatccggcaaaatcatgatcgtagacgacgatagaaatatctgtgagcttttaagattgtatattgaaaaggaaggctttgaaacagccattgcaaacgacggcaaggcggccgtgcaaatgtttgattccgtcaacccggacctcatgctgctcgatatcatgctcccggagctcgacggctggcaggtctgccgcgagatccgcaaaaagtcccagtgccccatcattatgctgacggctaagggcgaagtgttcgataaagtcctcggcttagagctcggcgcggacgattatgtcgtaaagcccttcgagacaaaagaggtcatcgcgcgcatcaacgccgtcctccgccgcattggcaaaaaagaatcctctcaggtgaaagaagttcactacgagaatctctccatcaatctcacaaattacgaactcaaggtcaagggcgtccagattgacactccgccgaaggaaatggagctcatctatcatctcgcctcaaacccgaaccgcgtcttcacgcgtgaccagctcctcgacgaagtgtggggctttgattattacggcgattcccgcaccgtagacgtgcacgttaagcgcctgcgtgaaaaactcgaaggcgtttccgataaatggtcgcttaaaaccgtctggggcgtcggctataagtttgaagtgaaagaataagccggcgaaaggaaggattccccttgcaaaaatccctgttcggaaaatacctgcgcgtcaccatggtcatcgtgctcgccagcttcatcgtgctcggcagcgtcatgatgtttgtgttctcgcagtacaccaaaagcgataagcgcaaactgcttatgcaaaacgcctcatccatggcgtccattacttccgtcgtagacatcacgaataacggtgcaccggagcttctgaaagtctttgtgcgcacattctctctcaatatcgatgccgatattttcgtcaccgatctcgagggcaacgtcctgttcggtgcctatgccaacagcacctcaaatatcggcgcaaatttcaccccgcagacaaagatttcggcagacatcgtaaagtgcgcgtccgagggctcctataccggtgacggacgcaaaaacggcatttacgataccccgtactacgtcgtcggcgtgccgctttattccgtcgccgaaacatcttcttccgaggtaggggacggaaacagcaccagagtgcccgtcggtgccgtttttgccgccatgaacgctgcctccctcacggagtatcagttcgccgcactgcaaatgttcctcatcgccgcagccgccgcgttcattctggcgttcgttgtcgtcggcctcttctcctaccggctcgtcaagcccctgcggcagatgtccgccgcagccaaaagcttcggcgacggcgatttctccatccgcgtgcctgtcacaagcaacgatgagattggccagcttgccaccgcgttcaacaacatggcagattcgctctccggcagcgaaagcatgaaccgcagcttcgtcgcgaacgtctcgcacgagttaaagaccccgatgacaaccatcgcgggcttcatcgacggcattttggacggcaccattccgccggagcgccagtcgcattacctgcacatcgtctccgacgaggtcaagcgcctctcgcgtcttgtccgcactatgttaaatctctcccgcatcgataacggcgagctgaagctccgcccaaacgatttcgatatttccgagaccgtcctctccaccgtgctcacgtttgaaaagagcatcgacgagaaaaagatcgacattcgcgggctcgataccttgcagcccatgcaggtgcacggcgatgaagaccttttgcatcaggtcgtctataaccttgtcgaaaacgccgtcaagttcacaaacaccgagggctacatctccttcaacgtctcggacagcatcgaccgcatcgtcgtcaccattgaaaacagcggctccggcatccagtccgatgagctccccctcgtgttcgagaaattttataagaccgataaatcgagaagtcaggataaaaacggcatgggtctcggcctgtaccttgtccgcaccatcatcaagctccacggcggcgacatttccgtctcctccgtcgtgaacgagtacacccgcttctcgttctatattccgaagccgcaggaacccccgaagttgaagtacaataccggctccatcccggtcaccgtgccggtcgaagatgccgtcatctcggagcgccccaaaaaggagcaccacggccacaaggataataaagagcccgatcagaaataaatccaaaagtgaggtatcacaccatggacgattttgaaaacaaaaccccggaaatgcaggagcctgcttcttccgaagacaatatccccgaaacaccggaaaccgcggagaccattcccgcagagcccaccgtttctgatgaaccggccgctcccgcagaaccgactgtcaccccggaaccgaccgtttccgatgcccccacggcagagccgctcccgaatgccgagcaggcgccggaagcccagcccatcccgaacgtgaacattccgccgcagccgcagcccgttcagcataccggctattatcccccgcagccgccgtatcagccctacccgtacaacacgcagccaaacgccccgcagtacggaaacccgccgtatggctatgcaaactacaacacccagccgcagtcggggcagtacccgccgccctacggacaaggtgcttatcccccgccatacccgcagaatatgcaaaatccgtatccgcatcccgcgccgcaaaaaaggaaaatgccgctcgggttgcgcatcctcatcatcgtcatgtccgtcctcgtcgcaggctccgtcatcggctttgcttcctacggcatctacgccgccgtgaaccgcggttacggcgtcacaacgctgccgggcgatccgctcatcccgaacttcccgcatgaaaacgacggcagcgacagcgaaacgcccggcgaagacgaaacgcccgatgcggacgacagcttcaccccgccggacatcgccgtcaccccgaatacggagggcatcaccttagataaagagccgaataccgccgagctcgatatcgatgccgtgtacgataaggtcatcccgtccaccgtgcttgtcatcacgcagagcggcgaaacgcagggcacaggcaccggcattttcgcaacggaagacggctacatcatcacgaacagccatgtcattttaaattccaagtccgtttccgtgcaggtcaaaacgtatgacggtgaacttcacgacgccgtcgtcgtcgggttcgataaaaccaccgacctcgccgtgctcaaaatcgacggcacaggctacatgcccgccgagttcggcgacagcgataacctgcgcatgggccagtgggtcgtcgccatcggcaacccgggcggcgagcagttctccggctccatcacgcgcggcgtcatctcgggtctcaaccgttccgtcggctcgtacagctcgaacggcatgacgtatatccaaaccgacgccgccatcaatcccggcaattccggcggcccgctcgtcaacttacacggtcaggtcatcggcatcagttccgctaaaatcgtctccgagcagtacgagggcatgggcttcgccatcccgatcaccggtgcaaagagcatcatagacgacctgcttgcaggcggttatgtgcaaggccgcgtccgcttcggcatcaaaggcaccgccatcacccagatgcaggccgccatgtacgacgtcccgcagggcttcatgatcagcgagattgacgaagacagctgctttaacggcacagacgtgcaggcgtatgacatcatcaccgccattgatgataccgaaacgaaatcgcttgaagagctcgcaaacgcacttttaaattataagcccggcgataccgccgagatccacctgttccgcccgaacgagagcggcgtaggcggcaaagaattcaccgtcaccgttaccctgctcgaagataaaggcgaaacgcaaggctaacacttgcctgcggcaagcgaatgaataaagtctttagtcaagttttcttcgagaaaacttgcgaattccaaaggcagcgcctttggtcgtcgtccgcagacgacgaaacaccttttgcctcccaaaaatcaggacgggagaacaaacagtccggtggactgtttgttcgtgggagacccaattagggggtctcccactgaatttgcgcggcaaattcataaaaaccgcctttagaaatccctgaaaattacacgcaatacaccaagaagcgcgcagctcctccaaaagctgcgcgcttcttttttaatgatatatctctctttgttcgatatgatattttcctcgcggagaatgatataacgccttatctgaacgccaacaccgcgtacgttacgccgctttcgttcagcgatgccatgccgctgccgtccgtcggggcggtttgggtctggcgcaccgtcacctgcgccgtggaaagcgtcacgccaaggctgttctggccgcctgccgctatgccggcgtattgctttatgcagcccgtcgtcgcctgcgaaaacggcttgtccaccgcaaaaacgatcaccgcactcggactgaagccgaataagatcgtgcgcgaggccgcacccgtgcccgtgtacgtgcgcacctccgtcggcgtatctaaacgctttctgcgcgtgtcatttaaatgcaggttatcgttttgaatgtgcccgccaagctgcgactctatggcttcgttgtccgccacaaaatccacacggcgcggcttgtccgtcccctcccaaaggcaaaggccgagaaccgttgattttttacttgctgccatgtttctcctttccgctcataaaacgtcgagcgcgttccaagtcttgtttcgaaggtcgagcacattccacgagctccccgccgcgtcctgtgcgtcccacgtgtttttgccgaaatcgaacaccaaactgaggtgcacaggcaaaaacgcgcgcgcttcgctttccgccgccgcttcggaaatgcccatggtagagagcacatttatgttcagcacgccgcccttttgcgggacgagcttgccgttgatgcctgccgccaaaagctgcttttgcatcgcttccactgtgtggtctgcgggggtcaccgcgcctcgggtcagcagcatcgcgcgccggtttttcgtgctgtccacggatggcaccacgcggaacagcgattcaaacgctttcagcccgtcctcctccgccgtctgcacaaacgcgtcgcgccgcacatgagaaagcgtatcatacacgagttcaagcccctttgcatacgccgcaagctctgccgaaagccacttgtcttctccaaaatacagccccgttttttcgagcatcgcgcgcatgcgggtttccagttccgtcatttgccctccttactgcgtctccagcacatttacagcgcccgccgtgacgatctccccggcgttcggcgtaaagtccgccacgctcgccggcaccgtgcagttttgtgctatgcccgtctccatcaccgcatggattagccccgccgtcacaaacggctcgcccacctcaaacgcattcaggtacgccgtgattgccgccgtgcacaatgctttcgcgtcttcaaacgcgcacccgtccttcggcttcacgtagactgtcaccggctttttcacagccaccgctgcagccaccgtcacgtccacactgatctccttgagcttttcgagcgtctctccgacttttccgagcacctcgtccgtcaccgcgccgttgtcgccgtacaggtacaccgccaccgtgttcacaccgtttgcgcgcggcaccacctgaacgcttttcacgcccggtgtcatcagcgccgcacggcggtacgtctccgtgttcgagccgttcggcagtgcgtaaaagcaccgcaaaaggcgcgtgcgcagcgcttcgtcgtcctctttatccgcgccgcccgtaaacggcacatcgttcgtcacgctttcaatgcccgctggcggcgtgatgagcgtgttcaccgcaccctttgccgcgttgccgcgcctgccgcccaaaaccgcctgcgccgccgctgtcaccgtcagtgcgcctgcgggcagcacagccgcctccgtcgtctcatattccaccgcgttttcgccgcttgccgcacacaccgtgcccgcggggatctccgccgcgtagctcagcgccgttcggcgcgaaaacgtcagcgtgcccacagatttcaccgcgtctttgcgcacaagcccgcgctcttcggcatgcaggtcaagcgcctcgcccgccgccgtctgcggaaagcaattcagcttcagcgattccgccgcgcacagcaccgtatacaactcgcccgccagtaccttcagacggatcgaaatgtccgccgcatcctcgggctccacgcccgccagcgttttgtattccgccgccatgtgcgcataaatttcctcaaatttcacactttcgctcctttcaccgcaatcttccccgtgccgagcatcgtccggagtccgaagataaaccgctccccctcgcgccgcacggaaaccgcctcaacaccggctaagggcaacagcgccgcctgcgcataccgaagcgcccgctcctcggcgtgctcgtccgctgcatccagcatataaaaccggctgccgagcacgcggtcatagcaaaacgcgccgcgttttaggcaaatgcgattatacgcgcgctgcataagcgcgttaagcccctcggccgtcttcggcagccttgtcgccgccgtctgcgttatgccgtttaaaatcacgacctccacgctattcctcctttttctcaaacacctgcccattgatgacgaccgtgccgtcgagcttcaacacgatctccgcaccgcccgcggagaacagccgcacctcgccgggcaaaagcgttcccgcgtcgttcacaacgccaaggcacacaccgccggtcatcacagcctccgtcccctgcggcacgctcaccgccatgccgtacggcaccgttacagtcggtgcacggcgctccagctcggtgcaaacggaaatctccccgccgcccgtcgtcacaacgcctgttttcacgctttcggccttttccgctgtctcctttttcgtcagccacatgttcatgcctcctttaaatcggttcaaaatgcagctcggtcttcacgtctttcccgcgcagcaaaacgtttttggagatgagccgcacctcgccaagctcctccgtccgcatcgtgtcccccatgttcccgtctatataagaagcacacgtcagctttagtcgctttgatgccctgcggctttcatttaaaagcgccgtcggtgctgttttcgcataggcggaaagataccgcacgcgcacctgcggggccaaaggatcgtgatattccgcgctgtatgcgcccgtctgcgcgttttgcaccgtaatgccgctcagcattttgtacgggcaaaaaatcacctcccgcgctgtcacccagtcgggcttcaccgttttcggcacgtagctttcaaagtgcacgccgccgcttttgtccgtatacggcgtacagtttagatatctctcagagaacgtttgcagcgcttcaaaacagctcgcgcctttttctacggtcaaaacgccctccaccggccgcctgtcgccgcccacggcgtgcagccccagcggcatcagatacatccgctccaaaagccgcagcgagggcaatctaagctccatcggtgccgcctcgttgtcgagcaaaagcgccgcgcggctgcgcagggagaagacctccgtgcgcgcgccgttctggcatttcacgcggtgttcgtccacgataccgtcaaagagcaccgcgccgtcctttttaagcaccgcccccacgggctcttccgtaaaaagccgctttcccacactaaaccgcaccgtcaaactgtccgccaccgtatccgcgtcgcttcttaaaagccattcgttcggctccgctttaggtgagtgtttttcaccgcttgcaaacacaaactcaagcgaaaaatccgtcacggaacatgcacctcctcgccgtccttcagcgccgcaatgcacgcgatatgccggttattctccgccaagcggtcaatcgaaacgcccgtaaaatacgcgtaatcccacaggctctcgcccgccttcgcgcggtatgtccggccggagaacgcttcgcttttccccgccgtctccacaaaggcgaacgtgtacggcaccgtgtttttctccggcacgccgatgagcgcaagctcgctcaaaaccgcctcaaacggcctgtgccccggcaagtacagcgtatctgtttcaccgaaaagcgcttccaattcacagtaaaccgccatcgcattctccccggtaaagtgccccttgcccgctacgcgcgccttgcgcttgccgaccgcctccacacgttcttcgccgtcaacacccaccgtctcacgcagcagacacgcccgctcgagttttaattccgtcgggttcaccggaaacacaaagctgccaaactgcatcgtcatcaggttcatgcaaacctcctatccgcacgaagcagcgcgggatatcgccgctcctcgcgctccaaaatgccggagagcgcctgtgcgtttttgttttcttcttccaccttatgcctccgttccgctttgtgttcgctgtgtgattttttcacacgcacccgcttctatcacaagcttgttttcgctcgccgctttcaaaacgcagtgcgtgtaccgcgcgccgcctgtttgcagtgtgaattcgccggggagcgcctcctcgccgcccgaaaacccgtgcagtacgaccgtgtacaccgctttgcccgccaccgccgcatacggattttcctcgccgatggcgtaatagcgcttgaccttcgcttcgtgcgaaattttcaccgcgtccgccgtaaataccttgtcgccgattaccaccgccgcgcgtgcgttatccgccgcacccgtcgccgcctgcaccgtgcaaagcgtcacaaggcaactgagcgccgccgagtacgtcgtctcgctccgcttcacactgcgcagcgcacacggcaaagacgataccgccgcacacaccgcgtcaaacagccgcgcgtggtcgtccctttcgcgcgcatacagctgcacgccgagcaccgtttcaaacacaccgtccgcgttttcctcctgcatcacgcccaccgtcaccgcggcacgctgcggaagcctttgcagcgtgcccgtaaacgccgggcgcaccgcgcagtccggcaaaagcgctttcagcttttccgcaagcgccgcactaagctccgttcccgtcatctttttcctccttttccagcaccgcgcgcacgtaaagcgccccgcaaatcccgcttttttcctcggcatataaaacgcggaacgtctcgccgcccgcagtcagcctcgcgttctccgcgccgcaaagcactttgccgtcgccgaagtagacatacagcggcttcatcgccccgccgaacgtctccgtttccgcctgcaaggccgttttgtcttccttcaggcaatgcacaacgccgcggcaaacgaccttcacgccgcttatctccgccatcatctgctgcgccctcaaaaatacatttctcacaccgtgtcctccgtcacgccgaagtaaaaatcctcgtcacgcaaaaccccggacaccgcccgctcgcactgctttgcataggcgagcgccctttcgctgcctttgtcaaattccgcgcgcacctcgcccgccgtcaggcttttcggcgatgctgcttcctccaaaagccaaaactgatacgccgcctgcgccgcagccgctgcgcacagcgcctcctcatgcgcgttttcttcctccacagtgcagcaaaggcgcgctttaagccgctgcaccgcatcgccgctcagcatcaaaagcaggtcttcgcggtcgtcatttgtcaaaagcttcagccgttccagcacgtttcgtatctccatttgcccctcctttttttattcggcaaagccgtaccaaagcggtacggcttgccagaatcgaataaaatcagtagctaaggccctgtgcggcgccgccgtagatctgagcaaagcccgccacggcgctcacggccgcgcgctccatctggcggtcgatgagcttgtcgtagtcggtcagcacatcgcccgcctgcaccatctcaagcgcacagttcttgtcgagcgcaatgatcttcttcgcgtccatggacggcacatggatgagcgtcgcgccaagcggcgtgatgagcttgcccgcacccttaatgttaaggctcgcctgcgcgtccttaaactccgtgatcttaaggagcgcctgcaaagcagtcgttcctgccagaatcgtattgaagttatagtcggaaagcttgccccacagcgtcacaaggtcgttgtaggtcggcgcagcggtaagcgccgtcacggtgatgcccgtattcgtgccgtcgccgtttaacagcacgtccactgcgtccttcatctgtctgcgcgcaatgtacgcaccgatctggcgcagaatgaccgtaaagaggtccagtctatggtggcgcagcgcttcgtaggagctgacaatcagtctgccgcgcttatgcagtgtcacaagcgagcctgccgtcttgatgactgtctccggaatggccgcgccctccgctacggggtcttcgatcttctggtcagaagccgtcgccgtctgcacggtgcggtaatcgagcgtgtcgatcttcgtcacggtcgccgcgatgtccggcagggaagacgccatctccatgccctggcgcactgcgcgggcaacgtattccgggaacagtgccgcgctctgggaggaggtgaaaaacttctccacggtgtcgcagttcgcgccgctcacacgaatgccgaagcgtttaagctgtctctggtacgcgtcaagccctgcaaacggtgtgcccgcgtagttctgggagccgtccagctcctccaaaacctgtgtaaaattcttgcccggcacgccgtacatgcctttttcgagtgtaatgttttcaaatgccattgtataatcccctttcttaaatgcggaacgcgccgtcgtctgccgcgttcgtgtcttccgtcttttccgctgccagctgcggcattacgggcattttgcgctccgccgcctttgcgagcgccgccgccatttcttccagttctgcaatgccgagcgactttgtgattgcctccgtcagtccgcgtttaaactccggctgcgccacggcgctcagcttatagatgcgttcgcacagcgccgcacggtagcggtcgccacactccgcgcggtcgaaaagcgctttcagttctgttttgagcatgttgagctcctctttcgccaccgtcacgctgtcttcgccgtccgcgagctttttaacaatgtcgtacaccgttttgacctcctttttcttctccgattcttcaaagcgcggtgaaaatttctttaccacgcccgccgcgcgctgtgcaggcactgccacgaatgagaattcatacgcgtccgccgcgccgcttaaaatacgcacacagcgcttgccgttgtacgttttccccggcacgtgtacacagctttccgcgccgcacacggagcacacgcgctttttcactgcgcaccccacgctgacttccttgcgtatgccgctttcaatggattcaataaacgccttcgtcccgtcgtttcgcggcacatacgcccgtgctgtgagctgcgcatacggctcgtttaaagatgttacctttccgggaatttccttcaccgcagcgtcaaacacgcgcgccgtctgatttttgctcgtcggctcgtggtctaaaatgcccgtcttgccgacaaacagcttcgcaagctcctcgagtgtctctttcgtaaagcactcaccgtctctatccacctcgttgtcgcacaaaacgaccgaaaacgtgtacacctcctccggcttataggcgcggcgcgtgtaaaggttgatcttctccatcgccgttttatccggctgcacagccgtcaccgtttcgctcaagcttctccctcctttaaaagctggttcgtcttcgccatgagatacgccgcgttcgcgtggtcgacctcgtcctgcatcgtgatctcgtcccagtcgatctccaccgtgtcgtcaaagccgtttaagcgcagccacgtcttgcagatcttcaagaccgccggctccaaaattctgcggtacgccgtcagctcgctcgtcagcatgtccgcctgctggctcgacatgcgctccgtcgaggaccacgaaagccccagcaaaaacggcggaatgcccattttcgccacaatctgctccagcatctgccgcacgggcacttcgctgtccatctgctgcccgtccgcgccgatggctttaatctgcacgtcgcccaccgccacaaagtcgctcacgccggggccgtgcatcgcacggctccactcctttgcaagctgccccgcgcggtcacccgcgttcatgtagccctcgtttttgcacgtcaccgcaaagcgcacattgcccatacgctcccagttgatgccgacggtgcggtaaattttcaaaagcacctcgctcacaaacggcaggccctttaaaatggagcttcccatcgcgctgcccggcatcgggtttaacgccgaagtcaaaatgagctccgggtagcggcacggctccgcatgcccgtcccttacgacgaacacgcccgtttcaagcggcgagatgagccgaatctcgaggtcttcgagcgacgcattatacagcgcccgaatttccccgtttgcgagtacgatctccccaattgcattgccgtacgttaaaagctgctcaaaatagaccgataaaaagttatcgatgcccatgttgcagccgtttacgggcacggtttttaaaaacccgcgcagcgcgttttccgtgtgcttttcggggcaatacacctcaaacccgccgataagacgcaccagcttgtagattgccgcgtcgatgatcggcacctgctcgcgcaaggcacggtacagtgcacgctcgcctgccgtcaccggcagcaccggcggatacccgccctgcgtctgcaccgaaacggccgtgcgcttctcctttttcaaaaatcccaaatgctaactcctttccccgtctccctttgcaccgcgcaggcaaagctttcgcccacgccgagcaccgtggagacaaaatagcggatgtcgtccatggcatggtcattctccttcacaggcacatcccgcgcgccgtcgtctgcccagcggtagagggaaaactcccgcaccgcgtccatgcagccctttgtcaccttgatctgccccgtgcgcagcgccgttgccgtcatgcggatgccgtttaaaacgtcgtttttcgccgccgtcactgcaaaaccacggctctgcaaaagtgtgataaagctcgccgccgaggggtcgcatacgatgatatcgggcgttctgccgcgaatgagctccaaaaaccccttaaagtgctcctcgtccgtgcgccgcgtgttttcaagccgcgcgtcaaagtaatactcgtctgcgcggtaccacacgccgcacaaaagcccccaaaggcccatggaggtcgggtttaccgtgccgtaatcgatggacaccgcgtaccgctcaaaatccgctttcggcacttcgcacaggaggtcaagcgcaaacgggtaaatcagtcctgtcgccgccgtccacttgccctcgatgaaccggctgtaaaacgcgccggaaaacatcgttcggtagcgcttgcgcacgtcttcactcagcgacggattatcctccatcgtaaagtgtaaatacagcgcgtttcggctctcggctttttgtatccactcgcggtaaaaccagtgctgcgggtgctccgggttgcagttgaaccacagcttcgcgttttttagcgagcagcgcgcaatgccctgctccacaaaagagcgcggcatcagcgccacctcgtcaaacaaaacgccgccgagcgtcatgccctgaatgagcgccgcgctcgattcatctcgtccgccgaaaaggtaaaagcggttttctctgccctgatacgataggataatctcgttctctgcctgccgcacacgcatggaaaagcccatagactttagctttggtataagctccgcgaccacatttctccgcacagaacggatcgttttgccgcacaccgcaaagctcgtattttgaaagcgtgccatcgcccacagaaaaaaggatatccccatacaggtggttttgccgctgcgcaccgcgccgtcgcagatgacggcaagcttatcccggtgcgggcttttttcgccccaccagcacaagacctgcatctgcttttcggaaaacggcgtcacggcttatccccgtctttcagcgccgccgcgccgctttcaatggcggagagcagcgcctgtgcacccgacccgctcgcctcgagctcactgaggagccgcagcgcttcgatccggtcgaaaaaccgaatttccatgccgccgtttttcggtctgcgaatttcggagacggcgaacagatccatgtttttcagcgtgcgcgggttcacttcctcgcaaaagagcagccttacggcatcatgaatgccgccgaacgccaatctgtgaaagccctccttcgccgtttcgttcaccatgttccacatcctctctgaaagttttgaagcgccaaacggcgttcgttttttcgctcgcctgtttgtctcttcacccatatccccaaaacgcagaaaagtttccctcaaaagggaaacttttcaaattcatgtcctccgatgtcctacaatgtcctctgatgtcctgcgatgtccggcggtttttatttaatttcaggctccctctgattgaggaaaaagaagagataacgcgcatcaacgcatgctcacagctatataaaaagggcggcatggagccgccctttcagggaacctatgcaaccgggtttcctagactaaacagtcccccggactgttcaagcaatgcaaagcattgctttctaccattcctggttttttgttaggcaataagattttgctttctgaggaaagcgacttagggcgctgccctaagaacccgcaagttttctgaagaaaacttgaccaaagactttacttgtcgttctccgtgagcacatcgtgcatcaaaaacggcagacatttctcgaatttcacgccccaaatggtgttgtcaccgcatgcttttctcgtttcttctatgcactttgcggtgtaccgcacggcggcggcacaggcctcctttaccgttttgccgtttaacatcgcccccagcatcacggccgcgaaaatatcccccgtgccgtggtatttgcccggcacgcggtcggaaagcaccagcgccgtctcgtctttttccctatcgtaacacgccgcgccgattttctccccgtccgtatacgcacccgtcagaatgacgatcttcggcccaaagtcggaaagggctttcattactcttttaagctccttttcgtcatacggcccgtccttaaacggctcgtgtaaaaggcaatacgcctctgtcatgttcggcgttaaaatgtccgctttttcgcaaagcctcgtcatgctctgcgccgtttctttattaaaaatgccgtacagcgtgccgttgtcgcccatcacggggtctacaaggcgcagcggacggctgtgttcgtccgtaaacagctcgaagatttcccgcatagtgtcaatctgctcgcggctgctgaggtatccggagcagatgccctcaaactcggccccctcgcgcttccagtgctgtgccgttttcagcatatcgtccgttaaatcgcggtacacgggatctttaaagccgccgtgtgtggaaagcaccgccgtcggcagcacggatgtctcgcaccccaaggcggacagcaccggcagcatcaccgtaagtgagcatttccccgcaccggaaagatcgttgatgaccgccgcgcggcgcggtttttcttctgtatttaaaaactgcatcgggtttttccctcatttcaaaagtatttccgcttttattgtaaccgcggcggaaaataaagtcaattagcggtttacaggtgaaaaaaagaatggtaaaataaagggtacacgtataggcaaatatcctgcacccgcgaaaggagctttctatgaaaaccgaaaagcaacgcaagctcatcgttcgcatcggcgcggcgattttggccgggctgatgattctctcggcactttccgccgtactattcagttgaaaaaaacaacccccttgaaaatacattgtaaaggaatgatccacccatgagtaaaccgaagtactatatttcgacggctatcgcctacacctccagccgcccgcacatcggcaacacgtatgagatcgtgctcgccgacagcattgcgcgctataagcgcatggagggctacgatgtctacttccagaccggcacggacgagcatggccagaagattgaagaaaaggccaatgccgccggcatcaccccgaaggaatatgtcgacaacgtcgcgaagattgtcaaggcgaactgggacgtgatgaacacctcctacgataaattcatccgcaccacggacgattaccacgaaaagcaggtacaaaagatctttaaaaagctctacgagcagggcgatatttataagggccactacgagggcatgtactgcacgccgtgtgagtccttcttcaccgagtcccagcttgtcgacggcaagtgcccggactgcggcggcgaggtcaagcccgcaaaggaagaagcgtacttcttcaagatgagcaagtatgcagaccgcctcatcgactacatcaataagcacccggagttcattcagccgccgcagcgcaaaacggaaatgatgaacaacttcctcctgcccggcctgcaggatctctgcgtttccagaacctccttcaagtggggcattccggtcgattttgacaacaagcacgtcgtgtatgtttggctcgacgcgctcacaaactacatcaccggcatcggttacgactgcgacggcaactccaccgagcagttcaagcgtgattggccggcagacctgcacctcatcggcaaggacatcatccgtttccacaccatctactggccgattttcctcatggcgctcgacctgccgctgccgaagcaggtgttcggtcatccgtggcttctgatgaacggcggcaaaatgagcaaatcgaagggcaacgtcatttacgcagaagaccttgtagacctcttcggcgtagacgcggtgcgctattttgtcctgcacgagatgccgtttgaatccgacggcaccatcacgtgggatctgatgatcgaacgcacgaactccgaccttgcaaacacgctcggcaaccttgtaaaccgcaccatttccatgacaaacaagtacttcggcggcgttgtagagaacaaaaacgtcgtagaagatgtcgataacgatttaaagagcgttgtgctcgccacaaagaacagcgtgcagacgaagatggatcagctgcgcgtggcagatgccatttccgaaatcttcacgctcttcaagcgctgcaataagtacattgacgaaacgatgccgtgggcgcttgcaaaggacgaagcgaaagccgacagactttccaccgttctctataatcttgtggaaagcatcacgatcggcgcggcgctcctcatgccgtttatgccggacaccgcagagaagatcgtcgcacagctcggcacgaccttgcgcacatacgatacgctcgatacgttcggcgtttacccgaatgggggtaaagtaacagacaagccggagattctcttcgcccgtatcgacccgaaggagatgggcgagaagattgccgctgtggaagcgaagtacgctccgaaggaagagccgaagaaggaaattgagggtcttgcccggatcaatattgaagactttgcaaagattgagctgcgcgccgcaaaggtcgttgcctgcgagccgatcaagcgtgcaaagaagctcttgaagctcacgctcgacgacggcacctccacaccccgcacggtcgcatccggcattgcgaagtggtataagccggaagacctcatcggtcacaccgtcatcgtcgtcgcgaacctgaagcccgccgtgctctgcggcgtggaaagccaaggcatgatccttgcggcagacgcaggcgaggacgatgtgcgcgtcgtatttgtggacggcaccccggcaggctccaaaattcgctaaggaaaatctctatgatatttgattcccacgcacattacgacagcgagcagttcgacatcgaccgtgacgagctgctcggctccgtactgccgcaaaagggcgtcgttgcggtcatcaatatggcagccgattatgaaagcctcaaaaaaaccgtggcgctctgtgaaaaatacgattatatctacggtgcagtcggcatccacccggagtgcgcaaacgacctgcccgataactggctttcggacgtggaagccctgctttcccacccgaagatcgtcgccgtcggcgagatcggcctcgactaccactgggaggacgagtgcccgcgcgaaaagcagaaagaggtgcttatcgcccagctggagctcgcgaaaaaacacgacctgcccgttgtcatccacgaccgcgaggcccacggcgatatgatggacattctgcggaaatacaagccgaagggcgtcgtgcactgcttttccggcagtgcggaattagcacaggagaccgtaaagctcggcatgtacatcggccttggcggtgttgtgacgtttaaaaacgcgcgccacagcgcggaggtggcaaagaccatcccgctcgaccgccttttgaccgaaacggacgcgccctacatggcgcccgtgccattccgcggcaagcgctgcgacagctccatgatcccctacgacgcggcgaagatcgccgaagtgcgcggcatcacggcgcaggaggttttagaaaccgcctgcgaaaacgcctgccgccttttcggtatcacgctaccgaacgccgcaaagtaaaaggagcgatcatcttgaccatcacatatgaatacggcgataatctctatatcaacgtcacgaaccggtgcccgaacgcatgcgacttctgcctgcgcaacaacagcacgggcagcctgtacgcggataacctctggtacgagggcgcggagccgacaaaagaggaaatcttagccgaccttaaaaaacgcgacctcaattcatacgcggagattgtcttctgcggctacggcgagcctgcctgccgctgggacgacatgctttggcttgccgcgcgcttaaaggaaatgggcaattacaccctgcgcgtcaacacgaacggccttgcggactgcatcaccgggcgtaacgccgcgccggaaatgcacgggcttttggacattgtgtccgtcagcttaaacgcgccgaccgccgaaaagtacgacgcggtatgtcactcgaaatacggcccggaggcatttgatgccatgctgcactttacggcagaggccgtaaaaaacgtgccgcatgtggtgatgacggtcgtcagcaccatgcccgcagaggacattgaagcctgccgcaagctgtgcgaaaacgccggtgccaagttccgtgtacgcgagtatatctccgaataactgcataaaataacgaaagcagagtgctcaagccgaacactctgctttttgttttgtgattttagtttaatttaatcttgaatgtgattggcttatcggacgtataattcgtcttgatatgcagcccgttttcgtcgcgcgtccacacgggtgcatcgtctgtgccgagcaccgaaacgctctcgactaaaccgtggtacaccgtaccggcggtgtgctcctgcatacgcagagagcgaatgtggtattcgccgttgtcgttcaccttcagcgcaatggcaaagagcgtatcgtcctttgccgtaaagcggaaatcctcgcccgtaaagttctttttcacgccgtcggaaaagccgccgtcctgcacctttgtgggtccttcgccgaacgtcctccacacgtgtgtgtcataaattgcttcgccgttcacctgcatccagtcgccgatggcagtcagcaccgcggtgtcctcatcggagatggttccgtccgctttcgggcctacgtttaaaagcagcgcaccgtttttgctgacgatgtccacaaggtcgcagatgatgtcccccgccgggcggaagtcgttattttccgtgtagcaccaggagttcagcgcaatggcggtatcggtctgccagaaatacggcttgatgtccgccatttgcccgcgctcaatatccggcaccgccgtgccgaacatgtacgcatcgaatttataatcgatggcaacctcctcattccattccgcggcgcgattataatagtacgccgctgcttttttcaggtacggctttgccgcctcctgctgaatccaccagtcaaaatagagaattttcgggtgataattgtcgatgagttcgcacgtgcgcacaagccagtcttccataaattcttcagagggcttgccgtcgatggcatcgaaattctccgggtcgggcatggagggccaatagaggtcgtcacggtccgggttttgcggcatatcgctctcaaactttttgccattgctcatgaagaaccagtgctcaatgcggtgcgaggatacgccgagcgtcatgccctgcgcttccacggccgctttcagctcgccgactatatcgcgcttcggtcccatctcataggcgttccaatgtgaaatatttgagcggtacatctggaaaccgtcatggtgctccgccaccggtacaacgtattttgcgcccgcctttttaaaaagcgcagcccatgcgttcgggtcgaatttctcggccttaaacatcggaatgaaatccttgtagccgaaatccttgtgtgcaccataggttttgatatggtgctcgtagaccttggagccctctatgtacatgttgcgcgggtaccattcgctgtcaaacgccggcacgctgtacacgccccagtggatgaaaatgccgaacttcgccttttgataccacttcggcgtctgccagcttgaaagggacgcccacgtgtctttgtacggtcccttttcgatcacgtcgtcaatgctctgcaatgcttttttcatatcgatcatactattttcctcccaaaaggaacttttctctaagagatttttctctttcccattataccagcacatcagaaatttgcaagacaaaagccgacggaaacccgccggccttttgctgttatttgtttctgtaatagacatcgtttaattctttgagccactttttgtcgatgccgtcgagttgctcctgcgtgacgcggaacgcccagttgccgttcggcacgccgggcacgttcatttttgtgtccttgccgaagccgcagaggtcctgcaccggcacaatgaccgtattcgcggggctctgccacagcgtgcggatgacggcgtggcaagaagcactttcgctgccgccgaccgcccagtcaccgccggggaacgcgcagtatttcagcgcatgctcgcgctcatacggctgtgcctcccacagccagccgagcacggtgttgttatcgtgcgtgccggtataggccacgcagtttttcgggtagttgtgcggcatgtgcatgttgtctttgccttccataaacgcaaactgcatcacgcgcatgcacggcagctgcgttttttccagcaggtcgatcacaccgtcgtcgatgatgccgaggtcctcggcaatgatctttggatttttgaacgtgcggttcacggcgtcgaagaaatccgtcttcgggccgtcgagccactgcccttctttggcggtctccgcttcggcgggcacggcccagtaggcggaaaaagcgcggaagtggtcgatgcgcacggcgtcaaacagcttaaagcacgcgccgaggcgatccatccaccaacggtagccgtcttttttcatctctgcccagttataaagcgggttgccccacttctggccgaactcgctgaaataatccggcggcacgcccgccacattcttcggctcgccgtcctctgtcagatcgaacagatggcggttcgcccacacgtcggcactgtttctcgcaacgtacatcggcagatcgccgatgatctccacccctttgctgtttgcatattttttgatcttcttccactgctcgaagaacgtgtactggatgaactccatgaaaagcacggtctcggcctgctcctccatcgctttcgcgacggcttcggggcgatgaagcttcaggtcttcgtcagcccagtcataccactctgcgccgatattcgcttctttcaagatgatatacagcgcgtagtccggcagccagctcttgttttcctcggcgaacgcgcgtaccttatcgcggtaggcttcgtccgcacgggtaaatgcgcggtataagaccggaatgcggcgcagctccagaaaatcgaacgcggcggaatacgggtttgcatacatctgctcgcgcagctcgtcgtctgtcagtaagccctcgtcgcgcaattgctcgaggtcgatgaaattgcggttgcccgcaaacgccgaaatgctggcatacggcgaattgtacgcgtcggtcggcgtgaacggcaacacctgccaataggtgcagccggtgtcactcaaaaagtcgatgaactctttcgcttccttaccaaagcagccgatgccgtaggcaccgggcagggaggaaacgtgcatcagcacaccgcttgctcttttattcatggacttctcccttcttttgcataaattgctcaaatattgagatattatatctcataaacttgtataagtataccatactttataaggctattcaatggtaatcttacacagatttcagggagaacttttgaattgtacgtcattcgatcaggagcaccacggcgcttacgtcgtcctcgtgtccgtctgtgcggtcttttacggcgcgctccacaatgcgctcggaaagcgcctgcgggtcgtcgtcctcatagtttgcaatgaggtcgcatagccactccgtgccggaagccgtcacgccgtccgagaccatgacgagcatatcgcccgcatcgaggtctttttcgctgcgggcaaaggcgatttccggcagaatgcccacgggcacgcttttggcttccagatactccgtcttcttgcgcctgcgcagcaccgtgcccgcagcacccgccttgcgcagggagacgtgccccgtaaagaggtcgatgcacgcaacatccagcgttgcaagcgactcctccccaccctttgcgagcatggcggagttgatcatcttcagtgtgctctcaaatccgataccggcttttaagagcgactgcgccatacccgcggtcattgtgccgtccacagctgcccggccgcccgtgcccatgccgtcgcttaaaaccgagatataacgcccgctgccgtccgtgaacgcctcggcgcaatcgccgcagagagacgcgccgtttgctgcgtgctgcgcaaagccgcgctgcacggcataaacgggcttctgacacatttgcagctttaaggtatcgcccgccgccgtcacgctcggctgagtgaacgtgcgcccgcacgcgccggagatctcgcgtgtcagctgccctttgttgatgtgcaccccgtgtgtgcggcaaatgtttgcttcaatcgtcatgcggccgaatttatcaatgcggcagcagacttcaatcggcgtgagctcgcggtggcgcaagacctcgcgcacctgctccgcactgtcctcatcaaagcgctggtactgctcgaattcctccgccatgtcgccgagcatctgcgccgtggagcggaaatgttcttcgacgatggcgcgcacctgttcggcgcgcatacgggcgctttcttttgccaaaagctcgcggtattcgccgtttacggcatctctcagctccatggcacggttgcagcgcgtcaaaaacggcacatcaaagtcgctgcgttcgattttgccgcgctcccgcagcggatacgaaagccgcgagaacgttttttgcgtctcgtcgcgatttttgcgccagcacactgcgcattggctgcacccggtgcaaaccttctccgccgcgcggccgtacacatgcggcaggtcagccgccgcggtcgtctccagcttttccgagatgcgatctacggaatccgatgcgctgcgcatggcttccgccgtataccgcaggcgcaaaataacgttttttctaagagaatcgcccggcagcctgtccccgtgcgcggtgaataaattggaaagccgtcggctctgcggcaaaagcatgtataaaacggaggccgcggccacctccaccgcgccgtaaaacacctgcgaagtgctgttcacctgtaaggatgcgatgccgtttgaaatgacgaacgccaccgccacggcgaatttaccgagcggcgagaacacgccggccatcagcccgccgagaccgtacgcgccggagagatacgaaagtcccgccgtggagagcccctgcaccgtgcccgccgcaatacccgccaccgcgccacccgcaagcccgccgatgcgcgcgcagacgagcaccgtcagcacgatgagcacgcgcccgacggaaatatgcgagacggtcacgtttgaaaacgagagcagcaaaacgccgagcgagacgataacagccgccacgtcgccgctgtcaaacacggcggtctcgcggtgggtctccaaaagctgcacggtgcggcgcagaaaatacgccgtgcccgccgccaaaaacgactccgcaatgtacatggcgagcacatttgaaagcgagccgtttaaaaacaccatggcgatgcccgtcgaaagcagcggcaaaaacgctgtgaccggtgcgaagaccggatggtcgcggatggattttaactccgacagcgaccagcggatggcccccacggcgagcaaagccgcgatgtagcgcgcggggatatccacgggcgacgggaacaggtagcccaccgcaccgccgaggatgaccgcccacatggtcgaaaacggcgctgccgccgcgcctgccgccgcaaacggcgcgtatttgccgaagacgagcccacgcgccgttaaaaagcccgcaaggccgcccgccatcagccacaccgccctgcgcacatacggtacggtaagggccgcgcttatgcggtcccgcactcttaaaactgctttttcctccattgtcttttccgccctttcctgcactttgtcttttctgtgctaccattatacgaagccttgcccgcaggaaaacacgaaacaggcaggcgggttttaggattgttttgtgaaaagcacaaggtttctgtcgccgcgcctttcatgcgcattttctttgtcggtttctcttgcttcccacgtggaaatttacagttttccggctgtgccgacttgacaaaccgcaaaaaagggcttagaatagcggtaatatcaaaaccgatgattggaaatagtacccgatgcaaaacggcaaagagagcccctttcggtgagacggggtgcgagctgcgcggcgaatggctccatgagggcgggcgggaaaatcgcccgacgtttggccgcgttagaagccaagccgtaactacggctgtaaagcgggcgtttatgcgccaatttgggtggtaccgcaggaatttgacctcttgtcccttgttttaagggtgcaagaggttttactttttggggtgtatctgaaaagtcaaaaacttgtctattccacaaatacggacggtttctgcgttgaaaattctcggcagccggaaggcttcctgcggttttcgccttgaccccgccttgtctttgcgaaatatcctgcgtttcctttgttttcagatacacccgtaaaagcctgaaagtgcaaaatcaaatgaatcatatagaaaggtgacgttacgatggaatacaaattttcagaccgcgtgctcacgttaaagccctcggcaatccgtgaaatctttaaatacgccgctgacccgagctatgtttcgctttccgccggcaaccctgcgccggaagcgttcccgtctaaacagcttgccgccatttccgcaaagctgatggaggaagagccgattttggcgctccagtacagcacaacggagggctacccgccgcttttacagcatcttaaggcgtacatgaagtcctccaaaaacatcggcaccgaggatgacggcgtactcgtcacaagcggcgcacagcaaatcatggatctgttcacaaaatccatcttaaacgaaggcgaaaccgttatttgtgaagcgccgagcttcatcggctctttaaacgacttccgttcctacaaagcaaagctcgtcggcatcccgatggacacggacggtatgaacatggaagcgctggaaaaggcgcttgagaccgaaaagaacgtgaagttcatctatacgattccaaacttccaaaacccctccggcatcacgatgagccttgaaaagcgtcaccgcctgtatgagcttgccaaagcgcacaacgtaatgattctggaagacaacccctacggcgacctttactatgaaggcgagccgctgccgagcatcaagtcgtttgatacggacggcatcgtcctctacgccggttcgttctctaaggtcatctcccccggtatgcgcgtgggctacgccatcggcccgaagccggtgctcgccaaaatgaccgtctgcaagcaggggcaggacgtgcacacgaatatctggtcgcaggttctgtgctaccgcttcatgacggaatatgactttgacgcgcaccttgcggggctcagaaaaatctacacgaaaaagcgcgctttgctccttgacctcatggaaaagcaccttgcgccgtacatcacgtgggacccgttcaacggcggtctgttcgcgtggtgccacctgccgaagggcgttgacatgatggaatttgtacagaaagcgctcgaaaagaaggtttgcgttgtgccgggcaccgcatttttgacggatgaaaacgagccgtgcgacgcattccgcatcaatttctccaccccgaccgatgagcagctcacaaagggcatcacgctgcttggcgagaccatccgcgagatggcggaaaaataaaagatatcagagaggaaaattaccatggaaaataccgtaaacaccacacccgaaacaaaaaagaagcgcgttttgagcatgattcagccgacgggcatgttcacgctcggcaactacctcggtgcgctgaagaacttcgtcgcgctgcagaacgactatgagtgcgtgtacgcacttgccgacctgcacgccatcaccgtgcgccagaacccggcggaattccgcaaaaacacgctttccgcctacgcgatgatgctcgcgctcggcatcgacccggaaaagagcattttcttcatccagagtcaggtgccggagcacgcacagcttgcatgggtattgaattgctacacccagttcggcgagctctcccgcatgacgcagtttaaggataaatccgcaaagcacgccgataacgtaaacgcggggctgttcacttacccgagcctgatggcggcggatattctgctttataacgccgattacgtgccgatcggtgctgaccagaagcagcaccttgagctttgccgcaacattgcggagcgctttaacgggctttactccccgacattcgtcgtgccggagggtcttatcccgaagaccggcgcgcgcatcatgtctttgcaggacccgacgaagaagatgagcaaatccgatgaaaacacggcgggcttcatcactatgctcgataccccggcggagatcatgaaaaagttcaaacgtgctgtcacggacagtgaagcccgcgtctactacggcgaaaacaaagccggcatcaataacctgatgggcatttacagctgcattacgggcaaaagctatgacgagattgaaaaggaattcgagggccgcggctacggtgatttcaagaccgccgtgggcgaagccgtcgtcaaggagctcgagcccattcaggcgcgctataacgagctcatcaaggacaaggcataccttgaaaagtgctacagcgaggccgcgcctcgtgcagaggccattgcgcgccgtactttgcaaaaggtcatgaagaaagtggggtatttgccggtcgcacactgagcatacgggaattgacaatttctttctaagccagtataatggacatggaaatcgaaaagccgcagcggtctgtttccgcgcggcttttttcttgagaaaataaacgaccctttttacagaaaggatggatccaatggcaaagcacatggccggcaaaaatcagcgcccgtattctgccgaagacagagcgcgccgcgccgcaaaggctgacccgcgcagcacggcttccgagctgacgccggaaacgctgtacgcaaagcaatcgtcacaaagcgaaaagcgcgtcccctcctccatagaaaatctgcattttaccccgaagccgccgaaaagcggtcccgagggctttgaagaaacacgcgaatatcccgtaccggcagcgccgcaacaggaagcgccccgctcggagcgccccgcgcctgcacccgctccacgaccggagccgtatgaggacgaagacgactacgaagagtacgaagaatatgaggaaggctacgacgagaagccgcgccgaaagcgctcgcccgtcgtgcccatcgtcatcgtgatgatcgttttggccatcggcattttggggtacattgcgtacagcctcggcgcgttcggcaagctcttacccgctgccgccacacctacgccggagccgacaccggaagccgccgcaacggcagagccgacacctacccccaccgcagagccgaccgccacgccggagccgacaccgccgccgatctatgacgacggcacggagggctacatgtcctcgggcattctcatctacaataacaagggctttgaaatgttctacggcagcgacagcatggcgaccgcctacgccgaaacgctgaatgactgtgcaagccagctttccggcacaaaggtgtacagcatggtcatcccgaatcactcggaattcggcgtgccggagcgcgtgcgcaattactatgaggaagcttcccagcgtgagaacaccatggcggtcaacaatacgctttccgcaagcatcaccgcggtggatatttacgatgcgctgaacctgcacaacaacgaagacatttattttgataccgatacccactgggcaccgctcggcgcgttttacgcgtataaaaagttctgcgaagcggcaggtgtaacgcccacgacgctcgacagcttcacgaaaacgtcctctgacttcacgggctaccttgcctacgttacgagcgaagacgtgctgaacaacaaccccgatacactcgatctctacgacccgaagtacaactacacatgcgaaatttcgtatgacgggcagtattttgaggaaaccgacagcctcaatagccacgacgagagcctcggctacgccatgtacctgcacggcgatatgggctgcgtgcgcatcacgaaccacgacctttccacgggccgcaagctgcttgtggtgaaggactcctacggcaacgccatgggtccgttcctcggcgcaagctttgacgaggtgcacgtggtggacttccgctactttgaaggcgacctgccgacctactgcacggagcacggcatcacggacgtgcttttcgccgtcaacgaaatggccgtcaataccgagcagcaccagaattcaatccgcgctctgtttgattgaatcagcgcctccgcaccccgaaaaatcgcataaaaatcgcaccgcacgctcaaaaacgagtgtgcggtgcttttttgtttgaagcgctccgttaaatccaaaattcaccgcaagagctccgggtttttttccagaaacgcctgcaagctgccgtcttcgtagcggtaactcatcacaacgccgccggtctgcgtcttttcgcgcgcttgtcccattgcggcgccgaagtgatttacccataaacccacaaaacgcaaagcctgtacacatgcgcgcatagaaaaacggcaccgttacaaaaacgcggtgccgtttgcttttattgggttagatcgacttatattcgtccaaaaggctttgggcgagcttggagttgacgacggcgaaatcgtccggggatttgtaatcgagcgtgcgcaaaacctcctgcgactggcggtacacggccattttggtggtctggtacacgggctcctgacgacccttgacgaacagtgcgaaacgcagttcctcctccgttgcggcgcagaaataggcgtgcacattgccgtccagatttttgcgcaccacggtgacgatggcgtttttcacaagctccacggcggcatcatcgaggccggcctcgaaaatgaggattttctcctttaactcctgcgggtttttcacgctgcgctttttcagcgcgcgcacggcggggataggctccgcgccggataccgcgccggaggggcgcaggcagatcataaacgcgttcatcgggtcatggtagatcatggggtacgccatctgcgcggtgtagccgcagtggaggcattcccagtcaaacatggattcgcgcagaatgtcgcggcgcagctcggggttttcctccgcattgacgcttgtgtacatctctaatttctgcgtctggccacaggcggggcagacaatatctttctgtatcttcgtagacatcaaattcactcactttctgcaaacggaacctgccccggcgcaaaaggtgggcgtttttccgcgcaaggaatcaagcgggcctcaggtccgccttttaacgttcattttaaagcgcattattcgtagggaacttcttcgctttcgtctttttcgggctcagtcgtttccggctgctcggcggcaggctctgccgcttccacggcttcgtctacggtaccgtccggcacgaatgcggcttcttcggcttccttttcctcttccggcgtgggagtgtactcctgcacgtcgtcaagggtgatctcctcttcttccgcttcgctgtcaccctcacgggtcagggcttccagcttctccacagcggcatcgatgcgcttctgggcggcttcaatgtcgatgcagtacggctccgtaacggtgttctctgcatcgcgcaggttgtggtagtagtagcggccgagagcgagataggcgcgctcctctgccttttcctcacagcggataacggtgcgcaggcgattcatgagcgcagtgcggcggttcttttcctctaccactttcacagcgccctgtacggcgccgccggcggtcttaaatgcggccgagatattcttcaaaaagttcatggtaaaactcctttcggtcaaaacgccaaggcgttcggtcatttcaagtttaaatacacctttattatatatcaaaaaagcgcaaaataacagccccaaaatgtaaataattccatataaatatgcagaaaagcggacatcgcaggacattataggacatcgtaggacatcttttgaacatttgttccgtgttcgattgacatttcggaaatttttgtttatgatgagagtcaacgaacacatgttctatttcgaaacgaaaggatcgtgactgctagtgaacgattacatttcctggggacaggagtatttggatgaggcggagcgcatcaaacggcggctgctcgtcatccgcgccgaacgcgactatgacattgcaggcgagcaggcccagcgtgtgcagatgctttacaccatgtatttggagtgccttgtaacaggccatgcgctgcaaaagcgcggaaggagggcggtttcgtgagcggatataagcccctttccgccggtgcacggcaggcgaagctactcagccgcatcggcgcagagacaaacaaaaatgagcttttagaagcgcaggttttgctgcggcgcgccatcggcaatgagctgactgaccgccagcgcgactgcgtgcagctttactacggcgagcggctgacaatgcaggagattgcggacgagctgcacctgacgcgcggcacggtgtgcaagcacctgcaaaaggcttcggcacgactttcgcacgctttgcagtattctgcgctcggcatgcgtgcggagcaaagccgcgaccgataacccccttgaaaagcctctccgattgtgctactatttgtacagacaactcagcatagatcacagcagatttatctgcggaaaggcttatactatggatttgattcaaattgacgaaaacgggctgcatctcgtttttgaaaagacggaagatttcggctgcaagctgctgcacttctctgcgctcccctttgacgagcgcagtctgctgcacgtgcacgaccgcgagacgggcggcttgcgcctgaacaccgagcgatacaatctcttggaaattatgatctccgggcaaaaccgaccgggcgagcgccacggcaacaaatacatttccacaagccccggcgaccgcatgaagctcgtctattttgcagacaagcacaacgagttcggccgcaagctggaaatccacatggaagataagacctgcggtattgaaacgatttcgcatatgcagttttataacggcgttcaggctgtacgctgctggacggacgtgaaaaatgtcggaacagagccgcaggggctggaatacgtttcctcctttgccctcaccggcatcgaaaaagagggtatgctttcgaccgacgacaaaatgcgcgtctggtacccgcacaacggctggcagcgcgaaatgcagtgggaaagctacaccttcccgcagctcggtctcgcccgctgccagcccgaggaaattcagcgctcctctaaggtgattggtgcgacgaacatcggcaactggtctacaaaggaatacctgccgatgggactgcttgaaaacacggaaacgggctccaatttattctggcagatcgagcacaacggctcgtggcactgggagatcagcgaccagatgggcaacttctacattcagttgagcggcccgacggaaacggaatcgcactggtggaagaatttgcagccgggcgaaacattcacgacagtgccggtgtgcgtaggctccacgctcggcaaatttgatgacgccatgggcgagctgacgaagtaccgccgcatgattcgccgcaaaaatgcggacaacgagaaactgtgcgtcattttcaacgactacatgaactgcctgtggggcaacccgacgacggcgaaagagctgccgctcatcgacgcggcgcacaaggcgggctgcgaatacttctgcgtggacgcaggctggtacgcggacggcttctggtgggacaacgtgggcgaatggctgccgagtaaggaacgtttcccgaacggccttgaggaagtgatggactacatccgctcgaagggcatgatcccgggcgtgtggcttgaaattgaagtaatgggcatttgctgcccgaaggccgcgcgcgtgcacccggactggttcttcacacgccacggcaaaaaggtgcacgaccgcagccgctggcagctcgatttccgcaacccggaggtcgtggagcacgcaaatgaggtcgttgaccgccttgtacgcgactaccacgtgggctacatcaagatggattacaacattgagccgggcatcggcacggaattaaacgccgacagtgtgggcgacggtttactcgggcacgagcgcgcatatcttgcttggcttgattccgtctttgcccgctaccccgaccttgtgattgaaaactgttcctcgggcggcatgcgcatcgactacgcgatgctctcgcgccacagcattcagtctacgagcgaccaggaggactacctgcgctatgcgtccattgcggcgaacgcgccctcgggtctgacgccggagcagagcgccatttggagctacccgatgaaaggcggcggacgcgaggaagccgtatttaatatgtgcaatgcactgatgcagcgcatccaccagagcggtcatttggcggaaattcctgaggaggacttcacgctcgtcaaggaagcgctcgattattacaaaacaatccgcggcgacatcaagcgcgcgctgccgttctggccgctcggtacgtcgcactttgcggacacgtgggtctcgctgggccttaaaaccgcgcacaaagcgtacatcaccgtgtggagacgcggcgcgccggacggccgctgcacgctgcccgtggatttcctgcgcggcaacgagcacgtaaatgtgcgctgcgcataccccgcaaatcacgacacgaaatgcgcatggaacccggaaaagggcacgctgacggtagatctccccgcccccatctgcgccagaatttttgagctggagtattaaacctgcgcccgaacccatacaggacaccgtgcaaaatcccgatgcagacgatgatgtgcgtttggcggatgaggcgcaaaaggaagccgaagaagcgcggcagcgcgtggaggaagcccaaaagcgagcggagcgtgccgcacaaaaaatggaagacgcaatgaagcgcgccaagcttgcgcaggagcagttaaaaaagcgcaggcagaggccgaaaagctcaaaaatcagaacaaaaagacgtaaaaaatcgcccgcaggcacgaaaaacggttgcctgcgggcgatggtttttgaattttacttttcgatgtctttttcgacgttctgcggagcagtgggcgaagaagcgggctgcacgggcatctgcgcggaagccgctgcaggtgccgaaacgggtgcgtaggcgctgcgcattttggcggtggtgaccatgtgctttgcgccctttgccatggtgatgatggtaggcacggcaccgatgacggcgaagagatagacctgtgcaaggccgccgaagtaatcgccggaatcgacatagccttctttgataagatccatcatggcgcggaacgcggtgaagaaatcggtctcatagaactgcgccgcggtgattgaccaatcggcctgatacgcaaggaagatcatcaggagcatcaaaacgcaggaaatgatgatgcccggtgtgccgagctttttgccgagcatttcgtagccctttaacgtgcagatggccatgacaaggccggaaacggcggcgacgtagccgagctgaccgacgatgacgatgacgacggcgccgataagcgaaccgataagcgcacccacgatgccgggcaaaacctgctcctgcttctgcatttttgtctggttctgctgcgcggcggcttcgctgacctgcccgaagcacggttcacacaaaaggtacgcgttgccggagacggtgtaggcgtctacgccctccgggcgaccgcaatgctcgcagcaatttgtatacccgtttgttctgaggaacgtgatgagcgtatcaagcgcactgtgcagggcctctgccattttatctttattgccggagagcttcacaaggaaattgacgcggaaacgctgcacggtacagccgctcaaaaccttattcattttctcgagcggtttgaaatccgcggggttcggcgccatgcccatgcgcgagaccgaaagcgaaagcatatagtagacgcggttgttggcgttcggcataatggtgacagtatacccctgcacattgccgaaaacgccctctgcattcgggtcatacataaggccgttcacaccggccgctgccgcaagctttgccatttgacttttgttcatattccaatcctccaaatgttgttctttacctgtattctactatattcaggttggttcgtcaatcgggtggcgcaggaagtttttgttgccgaactcgccggaatgtaccttaatggcgacgttgccgggcagcttgcaatcgagctgcttatacatttcaatgaccttttcagggatgaccgtttttgtgaaataaaccttgggtttcacgaaaattcctcctaagaattcgttatgtacgggtgtgactccgcatacatttctataacattaaaagtttactttaagtcaatatgcgttttggctaattttgcaccggtcaatttggtgtgttcaccggatttgcaagcagaatgttcaaaaagtcttttcttccggaactttctgcggtaaaatagggaaaaacggagcatgatgcaggaaaggaagtattttgatgcagaaaccgcttgtcagcgttatcgtgccgatctacaacgcgcagaacaacattgtgcgctgcgtggagagcattcggcggcagacgtatgaaaatcttgaaatattgcttttgaacgacggctctaaggacgtgagctacccggtgtgcgagatgctctcgaaggcagacgcgcgcatcgttttgattgataaggaaaactccggcgtttcggcgacgcggaacctcggcatgcgcatggcgcggggcaaatatttgcagtttgtggacgcggacgacacactggagccgtttgcgacagaactcctcgttcagcgtgcggaggataacaacgccgacctcgtcattgcggcgtataaccgcattgtgccgtacaagccgaaaaaagaagcgaagcttgacccgcttttgccgaataaaaagaagcagctgacggagcagttggcgaaattccagacattcggctttctgccgatgggctttatgacaaaggaggaattcgcctgcgggctgatgcaggagccggcaagcttttactacggcgtgatgtggaataagctttaccgcgccgatttggtgcgcgcacacacggacgtgcggtgcagcgaggaaatgacgtggagcgaagacctgtattttaatttgacgtacatacgctatgcagaacggttttttgcgctgaccgcgccaatctacaactactacgacaaccccggcagcgcggtgcatctgacgaaggtgcgcacggcgattacggcgcgcacggcgcttttcagctactacaaggaattatacgagcagcttgggctgtacgaagaaaacaagctgcagattttcaaatatctcatctcctcttcggaggcgtgagcgcggaaaggacgtttaacatggcattcgtactcgaccaaacaaaaccgaaccagaaatattttgaggcaatctgcggcattccgcacccctcaaccgaagaaaaagccgtaagcgactacgtgtgttccgttgcggaaaagctcggtttaaactacgagcaggacaaattttggaatgtcatcgtgcgcaagccggcttctaaagggtacgaagacgcgcctgtcgtgatgctggaggggcacatggacatggtatgcgtgaaaacacccgagagcacgcatgatttttcgcatgaccccattgagatttatgtcgacgacaagggcgacatccgcgcgaaggacacgacgctcggcgcggacgacggttacggcgtggcgtacatgctggctgtgatggaggaggatttcccccacccgccgctggagctcgtctttacggtgcaggaggaaaacggctgcaacggcgtggacgcgctggacgcgggcaagctgaaatccagaagaatgatcggccttgacgtgatgggcgagacggtggaatacacaagctgtgtttcctgctttacgagcgacctgatgaaactgacgaaaacgtgcgagacggagcctgcaaagggcgcggccctcatgctgacggtttccggcgtgcagccggtgcactccggcgcaatggtgcacccggagcagttcaatgcgattaagatcacggcgcgtttgcttaatgcgctttccgaaaacggtgcggtgtaccgactttccaccatggcgggcggcgaagcggaaaactatgcgccggtggagacgaaaacggtgatcctctgcgacgaaccggacactgtgaaggcgattttaaacggcgagcttgagaaaatcgaccgcgaattgcaggacggcaagcagaatttgacgcttgaaatccgcgatgcggcggcgaacgagatgctttcggatgccgatacgcaggcgattgtcgatttgatctacctgatgccctcgaacacggtggcaatccggaccgcgggcgaggagatgacggcgacgaacaacgtgggcacggtatcgttaaacggcggcgcatttgaactggtgatgtccgaccgtgcggcgagccgcagctttaaaaacagtgtgctcggccgcgtgaagcgcttggctgaactctgcggcttcacgcttgagacgagcctgcgctatgactcctgggaataccagccgaactcctacatgcgccgcatgacggccgacctgatgaaagaagtgtacggccacgagatgatggagacggcgtgcccgggcggacttgaatgctgctctttactgccgcgcatggaggggctggacattgtgatgttcgcgcccatcggcgaaaactgccacacgacagacgaatacatgaatctaaaatcgtttgaccgcgtgtatgatttcctcaaaacgctgcttggcaggttgaaataaatatttataatttgatataaatattaaaaagcacgcccctttccgatgaatttcgggaaccggcgtgctttacttatctgcggtctatggtgacaacggtgcgataatcggggtcgagcttttgaatttcggcctctaacttttgggtgatgacggcgtcgctgtccttcaccgaaaacggcacggctgcgtcgaacacgatattactgtgcgtaacgccccagatgacgcggaaatcgtgaatggtgacggtggggtacagcgcggtgacgagcgactgcactttgcggtgcagcgcatcggtgcgggcatcgccgacgataacggggtcaaggtgaatgaccatgtggatacagaggtcacggctgaaatcacgctcgatgttatcgatgagatcgtggctgacgagaatgtcgtttttggcatcgacctcacaatgggcagaggcaaaacagcggcccacgccgtagttgtgcacagcaaggtcatgcatgccgatgatgccgggatacgagagcattttctcggtaatggtctgtacgagttctccctccggcgcttggccgaggagaggatctgcggtgctgattgtaagctgcacgccggagaacacgatgaacagcgcaaccgccgcgcccatgtagccgtccaaattcacgccggtgagcatggtaatgacggcgccgagcagcacgacgcttgtggcgatgacatcgttgcggctgtccttggacgtggcttcgacggactcggatttgatcatgcggccgaccttgcggtaaaagaggcactgccagagctttgccagaatggaaatgacgagcacaacgagggcgacgggcgtgagggcgttttcctccggcgtgaggattttctcaatggacgacatgccgagctgaagcccgaggaaaatgacgatgaacgagacgatgacgcccgaaagatactcgatgcgcgcgtggccgaacgggtgcttttcatccgccggcttacttgccattttaaagccgatgagcgtgacgacggacgagccggaatctgtgaggttattgacggcatcggccgtgacggaaacactgtgaaaaaccgtgccgacgataatcttcatcaaaaaaagcagaaaatttgtgacgataccgacggcacccgccacgcggccgcatttgtcgcgcacggcaggatcctcggtatttttatgatcgcggacaaagattcgcaaaatgagatcggtcataacgaaaatctccttttggttagcggctgaaaacccgccgaatatgcaagcagagcttgaggaaagctcctcaaactctgcttttgggtgatttaattttgtaaatcggcttacttctgatcaaagaactcgacgatttcgccgcaggggccggtgcagaacgcaatgcgcgcggtgatgtcggaaagctctacatctttcggttcgatggtgatctcgtagccggcttcacggacacgggcgacacaaccgtcggtatcatctgttgcgagcgcgagatgggcaaacttgccttccggcggcacatcgttctcttccgggacgggcagcacttcgatgcagctgttgtccccggtggagatcatcatgcaggggtatttttcgtcgccccaccggcgcacgaccttgaggccgagcaggtcaagatagaacgtttttgctttttcaaactgcgcatacgtcggacgcagtgccacgtggtgaatgcctttgatcaagctcattttgttttcctcccaaaagtacattttataaagacagggtatcgagaccgataccctgcttgatttgtaattctaaattactttctgttgaagatggacatgatgtcggagaaggtatcatcgtcgctcttcgcggaagttgtgctgccggtgctcggcgcagacgggttgccgaaaaggtctgcatcgctgatagccggggctgcgggcttctgggtcttttcgccgttcatgccgtcgaagccggtcgcgataacggtgaccatcatctcgtcttccatcgtctcgtcgaatgcagcaccccaaatgatgtttgcatcctcgcttgcgcgctcggtgatgagctgagacgcgacatcgatctcgtcgagggcgatgtccggagaggacttgatgttgatgatgacgcccttagcgcctgcgatagcggtctcaagcagcggactggagatagccgcaacagctgcctgctctgccttgtccttgcctgccgcacggccgacacccatgtgtgcatagcctgcatcctgcatgatggacttgacatcctcgaagtcgaggttgacgatgcccgggatctggatgaggtcggaaatgctctgtacgccctgacggagaacgtcatcggcgatgctgaatgcgtttgcaagcgtaatgcgctgctcgctgacgagcttcagtctttcgttcgggatgacaacgagggaatcgacgtgcttgcgcagctctgcaatgcccttttctgcctgatccatacggcgcttgccttcaaaagcgaacggctttgtgacgatgccgacggtgagggcacccatatcctttgcaatctctgcaacgaccggtgctgcacctgtgccggtgccgccgcccataccggcggtgacgaagaccatgtctgcgcccttgagggtagctgcgatcagctcgcggctctcctcggcagcctttgcgccaacctccggcttggagcctgcgcctctgccctgtgtattcttttcaccgatctgcacgcgggtcttggcctgcgagcgggacagtgcctgacggtctgtattcatgcagacgagctcgacgtgctgcacgccggcatctgccatgcggtttacggcgtttccgccgccgccgcctacaccaacgaccttaatggtctggggggtctcttcaagcatgttatcaatttcaaacggcattttatgttcctccttgatttggtctttaaccgttaacgatccgcacggatccgggattttcattcatcacgccgcctccggattcaaaacggttttctctcgagcttcgatcaaatccgccggatagcgtcccataaagggccatacctttacagttctttacagtctttcagctttacatagcttcatacactataatttatcacttttcccgccaaaattcaagatgaaagcggcaaaaaagtgggcctttgcaaatatttttactttacagcggttttcgggaaatctatggtaccggggctgttcaaattacccgaaaaacttgtgaaaaacaggggaacgcttccaaattttacacgttttcggcgtcgcctgtgttgtcaccgctgtcgtctgctgcggggtccgtgatgccgtcggtatcacccgttggattggcagtatcgccgttctccccgtcgccgtttgcggtgctgtctgagccgtccgtgcggcctgcggcatcacccgtgggattggcagtatcgccgttctccccgtcgccgtttgcggtgctgtctgagccgtccgtgcggcctgcggcatcaccgggtgcgggcgtggcggaggctgcggtgcggtcttcctcgtaaaacgccttatttttctccggcacaacggaaagatcgatggagccgacggtctcctcggtgatctcgccgctcgtttccatttgacgcagcatctcgaggccaaacgccattttgtaggacatgccgttcatgttgccgaaacggaacgtgatgcggttatcatacgtcagcgtaaggtcgtaggggttcgtcatgttgatctccgtgacgttctgcgtctcgtttttcgtcatctgctccgcgatggcgttatagacttctttgacggaatcatcgccgaacgtgatcgtttcgctgggctttgtgttcgtgggatttgccccgagcaccacagtcgtgccctcgcacggctgtgaagcgatctccagcaccttgccggaagcacttacatagagataacccgcgtcgcacgcgacggaaaacgccgtttcggcgggggtaatttcaatttcaatggtggaagggatatgctttacgatctttgcgctttcaatgtacgggaaacggtgctcaagcgctttttcgcggctttccgtttccagcagcacgaggttatcgccctcgttgatgccgcacacgcggcggatatcggcttcatcgtagccggcatctgacgtaaatgtgacgttgcccaccttgaaaaacacgaaaatgcacaaaaggaccgcgccgatgacgacgacgctgaatgcgattatattgaacaggagcagcgccctgctttttttctttctcattgcgagcttttccgctgcgctgcgtggagtacgcgccatgttcagcctccgtttttcacgttttatctcttacttttcgctctatattcggtatacgtctgcgccgagcgcccttaaattctcttcaaagtgcgcatagccgcggtcgatgtactgcgggtgcatcacctgtgtttcgccctgcgccgcaaggcctgcgatgacaagcgccgcgccgccgcgcaaatcctctgccgagaccggcgcaccggaaagctgcggcacgccctctatgacagccaccttgccctctaacttgatcttcgcgccgagccggttgagctcaccggcatgcttatagcggctttcaaaaatgttctctacaaaaatactggtgccgtcccccaccgccgccatggtcatgacgggcgcctgcgcatccgtagggaaaccggggtacggcatggtgcgcacatggcgcacgggttttaatctctgcggtgcgcgcaataataattcgctgccggactgcattacggcgcagccggtgctttcaaacgccgacaaaaccggcaaaaggtgctcgctgttgacatcacgcagaagcaccgtaccgcccgtgacggcggccgcggccatgtatgttgcggcggcgatgcggtccggcatgacggtgtatgtgctgccgtaaaggtgcggcacgccttcgatgacgatgcagctttcgcccgcgccgtgaatgtgtgcgccgcagcggtttaagtacccggcgagatcttcaatctccggctcacgcgcggcgtttgtgagcaccgttgtgcccttggcgcgggcggcggcgagcagcaggttttccgttgcgccgacgcttgggaacgcaagcgagacgaacccgccgcgcagcccgccgggcgcagtgcacagcaggcaaccgtgctcttcgcgaatttctgcgccgagcttgcgcagcgcctccaaatgcagatcgatgggccttgggccgagctcgcacccgccgggaaacgacaatcttgcttcgccgcagcgggacagaatcgcgcccaaaaacacgatggacgagcgcatctcccgcatgaggctgtggggaatatcgcagcgggtcatgccgtccgcgcagaccgttaaggtatcgcccgtgtgggtacagcggcatccgagccgccgcaaaatggtgactgccgtgtgcacgtcagacagtgcggggcagttgtgcagcaccgtttcgccctcacagaggagtgccgccgcaagcagcggcagcgtgctgtttttcgcgccctgcacggtgagctcgccgcaaaggcgattgccgccgcgcaccaaaaccgcttcctgccgggcacagcccgtatgttccagttcatattcttccatatacacaccccgtattctgtaaggcggcagaaagcgcgcctttggatacggtcatagtatgcagcggaaaaattttggggtatgtccgcctgaaatgcgttttacggtttacttttttgctttttcgcaaatgatgttgtaaatgcgatcatttgcatccagcacggccatagctttcgcgtttttgccgatctcttcggcgcggcccggctcggaaaggacggtgttcaccgtttcccacagcttttcaccggtgaggtctttttcttcgatcatcacggcggcatcgcggttcacgagcgccatggcgttatggaactggtgattttcggcaacgttcggggacggaatcagaatggagcacttacccgtggcttcgatctccgttaaggtgatggcgccggcgcggccgatgacgaggtcagcggcggcgaggcactccggcatgttgtctatgtactcgagcatgcgaatctgcggattttcttcttcctttacacccgctgcgtgcacttcgtcgaggaatttttcatcgtgctggccgtagccgtggatgtgctggtatttcttctctttggcgctttcaccgagcatgtatgccgcggctttattgagcgccgctgcgccgaggctgccgccgaacgacagcacaagcgggcgatcgtcgagattcagcgccttgcgggcggcttcgcgctcggcctgcaaaacggaaacgcgcaccgggttgccagtgaagacgcagttatctttgcggtcgaggtactttttcgcgtcctccacggcgagcatgacgcactccgcgtgctttgcaagcgctttagtcgtcatgccgggataggcgttctgctcgtggatgacggtgggaatgccgagcttctgtgcggcgcgaatgacggggccgctgacgtaaccgccggtgccgacgcaaatatccggcttaaacgccttgatgatgcgctcggactcgatagacgaggagaacaggcggaacacggttttgatgttgcggcggatgttcttcgccgttaatttacgttgaaaacccgagatgcggatggttttgaaatcgaagcccgctgcgggcacaagacgctcttccatgccgcccttgttgccgacgtacaggatttcggcatccggctgcttggagcgcagataaccggccgccgcaagcgccggattgatgtggccggcggtgccgccgcctgcaaataacacacgcataattgaataccccttttacattttttctgtattggaatgccgcgagaccgacagcagcacgcccatttccgcaagaagcatgatgagcgccgtgccgccgaagctgaagaacggcaggctgatgccggtgttcgggatggtgtttgtgacaacgcagatgttgaggatagcctgaacgccgaactggaacgtgatgccaagcgccagcatggtgccgaagcggtcacgcgcatgcagcgcgatatatacgccgcgccagatgaaaagcgcaaacaggataatgacaataagcgcgccgatgaagccgagctcctcgcacactacggcaaaaacgaagtcgttttgcggctccgggatgtagagatacttttgtctcgactgtccgatgccgacgccgagcagctgcccggagccgatggcgtagagtgactgcaccgtctgccatgtatcgacgccctccggcgggttgaacggatcaagccagccgtggacacggtccatggcgtaggcaaattttgaggaaaacagcacgagcgcgccgatggcggctgccgccgcgccgccgatgacggcgaaatagcggaactttgtaccgccgacgaacatcatgataaacgcgatgaggcagatgatgatggtggcggaaacgtgtttttccgcgatgacgagcacgcagatgaggcccaaaataccgaaaaacggcaaaaagccgtagcggaaggttttcatcctttcgccgtacagcgcgatgaggtgcgcaaacatcaagatgagcgcgaactttgcaatctcggacggctggaattcgacgaagccgaggttcagccagcgcaccgcgccgcctttgttcggcgctaattttgtgcccttaaagacgagcaccatcaaaagcaaaagaatggagacggcgaaaacgggcaggttcagtttatgcagctggtgataatcgaacgtggagatggcaagcatcagcacaacaccgaccaaggcgaacataccctgacggagaatgaagtaatagctgtttccgtagtagtaatacgcgtaggcatagcttgcggagaacatcatgacaagtcccacggcaagcagcacaaggatcaaaaacagcatggtcatatcaaggccgagacccaaagtgaaaattctatatttgatgcgcccgcgccgtttgccgcgccttgcggcttcggatgccgcctcttctgcgggcacggcggataaccggcgacttgggacctgttcaagcccgcgcgccgtggaacgtcttgtctgcgccattgctgcaaacctccttttttcagttgatttctattttatcccattttcaggcgtttagcagccgaacaccgccaaaagtacgccgatgataccggcaaaaagtgtaacgccgctgaacacgaagcaaatcttattctcgttccagccgcacatttcaaagtggtggtggatcggcgccattttgaaaatgcgtttgccgtgcgaaattttaaagtatgtaacctgtaagacaacagagagaatctctacaatataaataataccgatgaggatgagcagaatcggcatatccacgccgaacgccagcgcgcatactgcgccgccgaggaacagcgagcctgtatcgcccatgaagaccttagccgggttggcgttccagaacaggaagccgatcatcgcaccgacgatggccgccgcgtaaagtgaaagccccacgcggtttaaaagcatcgcgataacagagaagacgagtgcgacgacgagcgtgacggacgtattgaggccgtcgatgccgtctgtgaagttcacggcgttgaccatgccgacgatgaagacagccgccagaatgtagtagaagaagccgaggtcaacggagccaaggaacgggataaccgtttcggtggtgccgcccgcaagtgcgacggaaagcaggtaggcgccgacgatgatgaactgcaaaatgagcttttgaatctcggtgagaccgaggttgcgatgctttttgatgctgatgtaatcatctaaaaaaccgacgataccaaagcccaccgccatgagcgcacccgccacgaccttgacgaacatgagctgcgtttccgcgccgccgttcagccacaaaaatgcgatgcagatgaccgccgcgacggagctgccgatgatgaacatgatgccgcccatggtgggcgtgccctgtttatttttatgccagctggggccgacctctcgaatagtctggccaaatttgatcttgtgcagaaacggcaccatgaagtagccgagcagccctgtgatgaccgccgcaatgacgattgcaaggcaatacagtacaatatccatacgttatgaacttcctttcctaccctctcaatgtatgtttttactcttcgctgttcgttgaggtgttgcccgccgcttcgacgccgccggagctgacaaacgaaatgcggatgacggagccgcgcttgaccttggtgccctctgcgatatcctgactttgtgcgtagccggaatcgccgtcgcccacaacgagcacctgcacatcggcaaggcccgccaagtagcggcaagtatcgatatcatagccgatgaagctcggtacctccacatacgtttcgggatccggctcttcggtgtaaagcgcgaccatgccttccttcgggatagatgcacccggagacggcacctgcaccgtgacgagcgcgtcgtcttcggcgtcgccgacaaccgtgccgctgaagccctgctcttccagatggcttttcgcttctgccatggtcatgccaatgacgttcggcgcggtggcggagagattttcatattccgattccgtatactgcgggtctacgccgaggtacgggagcacctcttccatgatggcggcgaagatcgggccggcctgcgtgccgccggacgcgccgccgatctgcggctcgtcgtagaagacgagcaaggcgtactgcgggtcatccgccggggcatagccgccgtaggaaacgacgtactgcatgccgcggtcgctgccctctgccagatcctgataatacagcgcgactttttcggacgtaccggtcttgcccgccacgcggtaaccggcgacataaccgtttttgccgctttcgcttgtggcgtttttctggagaatagccgtcatgcgcttggagacatcttcggagatgacctgacgcttgtagctggtatcggtcgttttgacaatgttgccgtcgctgtccagcatgcggtctacgacgtgcggctgcacaaggtaaccgccgtttgccacggcagcaatggccgtgatcatctgaatcggtgtgatggagaagttctgtccaaacgaagacgttgcaagctcgacgatattgagctcgtcttcgctaaaataaaggctgtctgcttcgccgggcaggtcgatgcccgtgcgctgcgtaaagccgaaggcttcaaagaaattgaagaacgtgtggcggcccattttctgacccagccagatcatgtacgggttgcaggaattgcaaatgccgtccaccagcgtttccgtgccgtgaccggcgtggtaccaacagctgatggggtcgatggtgggatcatcaaacacccactgaccggtgcaggtgtacgtggagtcttcggaggccacgccggattccattgccatggagcccgtgaccattttgaaaacggagccggggtagtacgtatcgctgacggctttgtttcgccactgcttattctgtgcttcggcccacatttgatcggtgagctcgtcgcgcagtgcggtgacatcgatgcgctcgtaatccgcaagggcttttttcgcttccgcgcgcgcctcgtcggtctcggcgttatcgatggcaagctgtaaggtgtttaattcctgctgctccttttcctgcgccttttgcagcgcgtcttccaccttttccgggatggcgtcctcggcctcctgcgaaatggtgaatgggtcgttcgggtcgtagtcgccctttgtggaaagcgccaaaatggcgccggtcttgacgttcatcaaaacggccgtgccgccctccagcgcgccgcaggcctcaaggcccgcctgcagatgcttttctacgatgctctgtgcggtctcgtcgatcgtgagcacaaggtcgtagccgtcctgtgcctgcacgtattggtcatactggaacggcatgtcatcgccctgtgcgttcttcgcgctgacaaggcgacccgccgtgccggaaagctcgctgtcgtattccgtttcaacgcccgcaagaccctggttatccgtgcccgtgaagccgagcaccgtagaagccgtggtgccgtagggataatagcgcttgtagtcttccatcagcgtgatgccgcggccgatcttttcgtccttgatatactgcacgatctcatcgcgcacctcggtctccaccttgcgcttgacatagacaaagtagctgttctgctgcgctttttttaagacatcgtcgtaatcgagccctaaaatttcggaaaggccctttgcaatcttcacgtcgtcgccttcgtcgatgtagttcggctccaaggcgaccgtccacacgctggcgctctgcgccaagacctttgtgcccgtggcgtcgtaaatggtgccgcgcgagggcgtaagctgcgtggattgcaaactctggtcaaccgcatcggtctttaaggtttcgccgttgacaagctgcaggcggacaaggtttgtgataacggcgccaaacccgagcaccagcacaaagcccacgatgaccattgtgcgctgccagacgccggaacgatttgattttgccatgtaaaaaatgccgtcctttctgctgcgcccttcattcgcagccaaaagttgccgtataccgaaaaatgagagttaagaataaactctcaactctcctctcaaattcccctctgccgggggccgcataacccatttgtattctttcatgccgcaaaatagcagcgtatccgcaaaaaattcgtatgtataaaggctaaatcaggaaaagagcgactgcaagacctgccagatacggtccaacaggttcggtgtcttttcggcctgcactacggtgccctcatcatcctgcgtgaggctgatgtaggaggtctgcccgtccgctaccttttccatgccgagcttttcgcgcgcgatctgctcgatctcctccgtattgagcttggaggccgcctgcatttcgagctgaatggcaatgcttttctcctgcgaaaggctctcgttcgccgtgttgatctcatcggtgagctccgtgagctgcacctgactgaacaccaccgcaccgatggcgccgacgatgaccagcactaccgcaagattcatgagcattttgaccgtatttgcactgtgtctgtgactgcggcgcagctgtttttcatccagcttcaccacattgtttttctgtttttgtttttggggcgctttcggctccggaagcttcggtaccgcgctgccgtgatctctgctgtcgaaaagatcaaaatcgtatgcgtttgatgtagatgccatgttgtttcctcctttcggaaacttatcccaacaaattcagctgtattctctcagggatatcctaatctttcaaaatctcacagtttttcaataacgcgcagccttgcgctgcgggcgcgcgggttttcgcgaagctcttcctcactcggcgcaagaccctttttgtagatgagcttgcccttcggcttgttgccgcacacgcacacggggaaatccttcgggcaggtgcaaccctcgcaccacttgttcatctgctgcttgacgatgcggtcttcaagcgaatggaacgtgatgacggaaagcctgccgccggactttaacagcccgaacgccgccgcaagaccttttttgagcgcgtccagctcgccgtttaccgcaatgcgcagcgcctgaaacgttcttctggccggatggccctccgcgcggcgcaccgctgccggcacgctttcgcggatgatctccgcaagctctaatgtagtttcaatcggtttttcttcacgcgctttcacaatgccctttgcaatgcgcaccgcgcttttatcttcgccgtaacggctgatgatctcggccaattcctgccaagagagtgtgtttacaaggtctgcggccgaggtgccgctttggctcatgcgcatatcgagcggggcgtcggcgtggtaggaaaagccgcgctctgcggtatcgagctgataggacgaaacgccgatatcgagcagcacaccgtcgacattaacgatgccgtgctctaacgcgatcttgtccatatcgcagaagttacccatggcaacgacggagccgggatatttaccgaaccgctctttcacaacggcaatggcgtccgggtcgcggtcgatggaaagcaacgtgcccgttgtcaggcgctgtaaaatcgcgccggagtggccgccgccgcccgcggtgccgtctatataggtgccttccgggtcgatgttcaaggactcgatggtctctttgaacaacaccggtttatgctcaaaatgaatttcactcatgatatatttgtccggcggaacggatgcgttccggcagacactcctcattgaactttacccgaaaaaagccgggctgatgagcgccaagcggggcgaaaaggcaatgaaaatccaaagcccatgcggttttccgcagggttttcgctgcttgcacgtccattataccttatcccacatagaaaatcaacccgcggcaaaaaaatttatgtttaccatgttcgatgaaaaagcgcggatttccgatatttttcttgggttttgttcgtatattttccgattttcggcaaaatagcggtatgttgaaaattctgtgcattctcatgcaaaaaaacttttgcagtttgttcacattcccggttttcgggatacccctaattgggtctcccgcgcatcaacagtccaccggactattgatgctcccgtcctgctttttgcgaacgcaacagaatttcgctttctgcggaaagcgactcaaggcgctgccttgaaaatccgcaagttttctcagagaaagcttgactaaagactttaaaccgccgtttccgttcgctcgttttgctatgaaaaaacggcagctcgcccaactgccgcgaactgccgtttaaagctcttaaattactgctgtgcgcttgtgccgtggatggactggcgggtctttctcagctctgcaaggcttgcgctcatcgcgtcgtccgtgcggcggagcaggtcttccacatagtcgttggaggccttctgcatgctgcggaacttctcctgcgtctgcgccatgatgtcgtttgcctttgcctgtgcctggcgcacgatctcttcctggttgacgagtgcctttgccttctcctctgcgacgcgcacgatggtctccgcctcgcgctgtgcctcgctgatgatctgggcgcggtctgcaacaatggcctttgccttgcgcacttcggacgggatcgcctcacggatctcatctaagatctgttttgcgtcttcgctatctataaacgatttaccgcctgcaaagggaaggtgccagcctttctccagtacgtcggtcaattcatcaatcaaatcttctacggttgcctgcgtgttgctcataaaaaatccattcctttcgtatttttagccgcatttagtctgccgtgcggcaaagtctctgatttattttctctaaaaggcactcgggcacaaaatgggaaatatcgccgccgaagcccgcaatctgcttgaccatgctggagctgaggaacatgtgctcgatgctggtcggcaggaacagcgtttcaaactccgggttcagctttttattggtgagcgccatctgaaattcatattcaaagtcggagattgcgcgcagacccttcacaatggcagccgcatgcttttcgcttgcgtaatccgccaaaagaccgcgcacgcagtctacctctacattttccatatcggccgtgacggtgcgcagcatttccatgcgctcctccaccgtaaagctcgcgcgtttatccgggtttaccggtaccgcgacgatgactttgtcgaaaattttgcacgcacgggagatgatgtccatgtgtcccagcgtgaccgggtcaaagctgcccggacagatccctattctcattgatataccgccctttttgcgcttacaccatgctttgatggcgatacgcggtcaacaagatttttccgtaacggtagtcgcgcacgcgcacgaattcccccgccgtctccggcagctcttcgtccgtggggtgctcgcaaatcacgatgccgccgcggttcatgtgcggcgtgaccgcaaggagcgcctttgtgagcgtgcccgtgcgatacggcgggtcgagaaacgcgatgtcgaaggtctctgtgcagcgcagcagatacgaagcatactccgcgttcatcacctgcgcttcgttttcaaaccctgtggtgtggatgttctccagcacgacgccgcaggatgccttggcgctgtctacgaacacagcgcgctttgcgccgcggctgagcgcctcgagaccgatctggccggagcccgcaaacaggtcgagaaacacgcggccctccagatcaaactgcaaaatgttgaaaagcgcctcttttacgcggtccggcgtgggacgcacagcatcgcccgggagcgttttcaattttctgcctcggcgggaaccggttatgatacgcacagccgaacactcctttctcttttggaagtccgtgtccgaaatctaaaaaacatgtacggacacacttcaagttattatctcatttgaatagaaatatgtcaaccgtttttgcgcagtttttgcagagaaacgtcgaaaaatacgcaggaacaacgttattccccgtcgttttcttcgctgtggaaataacggtagacggcgcgggcggcaggggcgttcatgccgggcgtttcctccagcatttcctccgtcgcctcgctgacggcgcgtatggttgtaaaatgcttcatcagcgctttggcgcgcgtttcgccgatgcccggaatggacgtgagcgtggtggagatggtcgcctttttgcgctgctggcggtggtagccgatggcaaagcggtgcacctcgtcctgaatgctcgacaccagcgtgaacaccgcgcgcgtagactgaatggcgatttcgccgccgtcctccgtgatggcgcgcgtgcggtgcttatcgtcctttaccatgccgtataccggcacgtcgatgcccatttcgcgcagaagcggacgtatggcgcccacgtgccctttgccgccgtcgagcagaatgagatcaggcagtctgccgaagccctcgggcttatcggcggcgcggtattcttcaaaacggcggcggatgacctcgcgcatgctgccgtagtcgtcctgtccgacgacagtcttgattttaaacttgcgatacgcgcttttcagcgggcggccgttttcaaacacgatcatacccgcaacgttctcgccgcccgcaaggtttgaaatatcgtaggattcaatatattccggcgttttgggcaggtttaagagctggcgcagttcatcgagcgcggaggtctcacggcccgtggcgcggcccatagcctgcgcaagcgcttccgcggcgttcgtgcggcacatttccacaagctgcttctgttcgcccttttgcggaatgtggaacttcacgcggcgctccgcctttttcgtcagccattcttcaaggacgccgtcgtcgttgacggggccgtctatcgtgatgacgggcgggatcttatcgcgcatcgaataatattgcatgacaaattcgctgcggatctgctccggctcatcgtcggcgtttaataaaaacgattcgcggtcatacagtctgccgcccgcaaagcggaacacctgaatactcaccttttcgccgccgagcacgagcgcgatgacgtcctgttccggcacgcggcttgcgacaaccttttggcgctctttcagcttgttgatggccgtaatgcggtcacggatgcgcgcggcaagctcaaaatcgagattttcagccgcctcgttcattttctccgtcagcgtgcgcacggaatcgcttgtgccgccgcggatgaaatcgagcgcctcctgcacggcctcgttgtattccttttggctcacgtgcccgcggcacggagcacagcactgcttgatgtagtagttgaggcacggacggccgcggccgatctcctgcgggaatttgcgcgtgcaggacggcagacggaaaatcttccgcgcctcctccacggtgtccttgattgtccacgcggaaaggtacgggccgatatactttgcgccgtcattcaggacctgcttcgtctccgaaatgcgcggccagtcgcccgctgtcaccttaatataactgtaccccttatcgtcctttaagaggatgttgtacttcggctggtgctgcttgattaaactgctttccaaaatgagcgcttcaaactcgctgtccgtcagaatatactcgaaatactcgacattcgagaccatgcggcgcaccttttcattatggtttttatccgagccgaaatactggctgacacggtttttaagcgccttcgccttgccgatgtagatgatggtatcatcgcggctgtgcatgatgtacacgcccgggtgaagcggcagcttcatcgcctttttgcgcagctctttgatatgcgccattttttcttccgtaagctgtaccatgcgcacctccatgcagctcagtcactaagcgactgagaaagaagaaacgcctaccggaaatgctccgataggcgccgttttgacaagctgaaattattcggcaaagccggattcaacaagagccacgaggctgtcaacagcttcctgctcgtcggaaccatcagcgatgatgtcgatcgacgtaccgccgacgatgcccagagacagaacgcccagcaggctctttgcgtttacgcggcgctcatccttctcaacccagatggaagacttaaactcgtttgccttctggatgaagaaagttgccggtcttgcatggagaccaacctgattctgaaccaaaacgtccttcttaacacacattgcgattcactctcctgtaagtaatacattacatactctgaatgtcaaacatgattctaaagctcaaaatgcttcaatataagttattatagcataatttgtccccccgtcaagcggggtaccccatttttggatatatgcccgtggcatatcgctatgaaactatccgtgtttgtgcattttgctctgcttgttgaaaacatttcgtaaaatcagttcgccacagagggttaaacattcccaaaatccgcttattttctgccgaaagcgcgcttttcttccgcagtcagctcagctttttcaaagaggtccgggcgggctttctgcgtgaccttcaaagattgttcgcgccgccattttttgattttttcgtggtggccgtttaaaagcacctgcggcacctctctgccgcgccaagcagagggacgggtatactgcggatattccaaaagcccgtcataatggctttcttcctcaaagcacacgtcttcggaaagcacgccgggcagcatgcgcgccacggcatcggtgaggattacggcgggcagctcgccgcccgtcaggacaaaatcgccgatggagatttcttccacgtcgtattcctccaaaacgcgctcatccacaccctcataatgcccgcaaagcacgatgatattctcgtttttggcgagctccttcactttttcctggtctaagacccgtccgcggggggacatatacacaatatgcgggcgcacggcggtttgttcgatgatctcgtcaaacgccttcgctatgggctgcgccatcaaaagcatgccctttccgccgccgaacgtgcagtcgtccacgcgcttgtgcacgccctcaccatggtcgcgcagctggtgacagcacacctgcaaatacccgcgtgcgcgcgcacggccgatgatgctctcgttcaaaatattctcgcacatttcggggaaaagcgtcacaatatcaatccgcatccgctgcctccccggcgtttacgggcacggtctccgcgccgtcgccgaaaatacccggaatgggctttacaaacagctttccgctttcaatgtccgtcttcgcgatcatggcgtccacggcggggaacagaaattcctcgcccgcgccgtttacaatgcggtacacgttgttcgcaccggtctcgaaaacgtcctgcaccgtgccgtattccgcgcccgttgcgtcatcgatgacatgaaggccgatgagatcttccacgaagtagcggtttttcggcaggcgcacgtcgtttcggtcaagatatagaattttgcccctgtacaggtcggcctgtgtggcgctttccacgccctttaagcgcaccagcaaaaggcttttgtgtacgcgggaagataggagcccggcatccgttttgccgccgtcaaaatacagggtcttcacttttttcagaaaatcggcggaatcgcaccacggttccacgcgcatttcgccgcgtacaccgtgcgtacccacgatccttcccgcttccagaaattgttttttcatgtgttttcctcggctctgccgcagcgaaagccttcctctcttttaatataaaaaggacgcacgaagcccgtgcgtccctctttcgatcaatcgatctcaacaacgaccttttcgctgctgcgtgttgctgcggcacgcataacaacgcgaatcgctttcgcaatgcggccctgcttgccgattactctgcccatgtcctcttccgcaacgtgaagatgatagacgacggaaccgtcttccttgggctcatcgagtgtaacggaaacctcttccggcttttcaacaagaccctgcgcgatgattttcagtaattcctgcataagattgttcctttctcaaacgagaagacgggcaatcagataacaccgtgcttcttgaacagtgccttaacggtatcggtcggctgtgcgcccttttccatccaagcctttgccttttccggatcaacctttacaacgctcggctcttccatcgggttgtagtagccgatttcctcaatgaaacggccgtctctcgggtaacgggaatctgcaacaacgatgcggtagaaaggagccttcttagcacccattctgcgaagtctgatcttaaccatggtaatttcctccatattataaaaaataagttttatctattaaccaacgattcgtcggcaatatttacaattcaaatatacatcttgcgtaagaaacaaatgaaattcgtttctttatcgcatttacatcgggaagccgcccatgccacccatatccgggccgccgaaaccgcccatgccgcccatacgcgccatcattttcttgccctttttgccgccgaactgcttcatcagcttctgcatctgtttgagctggttgcaaaggcggttgacgtcttccaccttcatgccgcagcctgccgcgatgcggcgcttgcgggaagcctgcaaaagctccggctttgcgcgttcttcgggggtcatggaaaggatgatcgccgcgttgcggtccataatgcggtcgtcaatgtccatttcatcgagcttcgagctgttgatgcctggcaatttcgagaggatgccctttaacgggcccatcttcttcacctgccggaactgctccaagaggtcgttgaagtccatcttattctgcatcatgcgctctgcggtgcgcgccgcggacttttcgtcgattttcgcctgtgcgtcttcgatgagggacagcacgtcgcccatgccgaggatacggcttgccatacggtcggggtggaaaacctcgaggtcgtcaatcttttcgcccgtgccggcgaacttgatgggcttgccggtgatggccttaacggaaagtgccgcaccgccgcgggtatcgccgtcgagctttgttaaaatcacgcccgtgatgtcgagcaaatcatcaaacgactttgcgacgttcacggcctcctggccggtcatggcgtccaccacgagcagaatgtccgtggggttcaccgcttcttttatatttttcagctcattcatgagcgcttcatcgatctgcagacggcctgcggtatcgatgatgacgtaatcgttgccgtagtcgcgcgcgtggcgaacagccgcctgcgcgatcttcaccgggtcttcggtgcccatctcaaagacgggtacgccggcctgtgcgcccacgacctgtaactgcttgattgccgccgggcggtaaatatcgcctgcaacgagcaacggacggctgccgcggcttttcagcattttcgcaagctttgcgctgtgcgtcgttttaccggcaccctgcaagccgcacatcatgatgacagccggcgggtgcgcgggcattttcagccgctcttcgctgccgcccatcaaagccgtcagctcttcgttgacgatcttgatgaccatctgcgcgggggtgaggctttccataacgtcctcgcccacggcgcgttccgtaatgcgcgcggtaaagtcctttgcgaccttgtagttgacgtcggcttcgagaagcgccaaacgcacctcgcgcatggcctccttaacgtcgctttccgtcagcttgcctttgctttttaactttttaaacgcgttgccgagcttatcggcaagaccttcaaacgccatgtaaaaatcctttcagagccgcgccgctcagtccgtcagcttctttgcggagcgcaaaatgctctccacgttctgccgaatgaccgggtcgccgccgttcttttcgttttccgcttcgatctgtaacgcgtggtcgcagatctgcgtcagttcttcctgcacgctgcggaagcgctttgcaagacccagccgttcttccatttcaagaagctgctgttcggcgcgcttgatgccgtcgcgcacgccctgccgcgtgatgcccttctcctctgcaatctccgctaaagaaaggtcttcgttataatagcattccacgacctcgcgctgcttttcggtgagcatgtcgccgtaaaaatccagcaggaacgtgatgcgcagatcctttgccatagttcgctccgtttccgggcgttttcaattttaagcgccctgctgtaaagtttttttctttacagcttttgtattatacaatagccgccttgctttgtcaagcattttcgccgtaaaaatgcgcccgttttcggcactttgcgccgcaatgctatacgcctgcggcgtatggtttggcttcactgtgctatttggcttgcgcctgatgttatcgctctgcgggcaattttgcgcacgacatacatcaccaaaaacaaagcccacgatttttgcataacgtatgctttacaaacccagttttgcatggtatatttattcgtatagcgcaaacgggtgtatttttgcaagctcactcgtctgtgcttgcattcagttccgttcggcggagattttctctgtgcggcgggatacggaaggaagcgaaattttgatttactttaactgtgattacaccgaaggctgccacccgaacattttaaagcgcctttgtgaaacgaatatgatgcagactgtcggctacagcgaggacgaaatttgcgatttggcgcgcgcgaagatccgtaaagcatgcggtcgcgaggacgtggacgtgcattttctcgtcggcggcacgcagacgaacgccaccgttattgcagcgattcttcgcccgcaccagggtgcgctgagtgcggacaccggacacatcaacgtgcacgagaccggcgcggtggaagcgacgggtcacaaagtgctgcctctgccctccaccccggacggcaagatcaccgcagaacaggtggaaaatgcctatctggcgcacgtgaacgatgcctcgtttgagcacatggtgcagccgaagctcgtttacatctccctgcccacggaaaacggcgggttatattccaaagcggagctgaccgccctgcacgatgtctgcacgcgctgcgggctgtacctctttatggacggcgcacgtctcggctacggcctgacggctcccgaaaataacgtgacgctcgcggatctctgcgcgctttccgatgtcttctacatcggcggcacgaaggtcggcgctttgttcggcgaagcggtcgtaatcacgaacccggcgctcaaaacggatttccgctaccacatcaagcagcgcggcggcatgctggctaagggccgtctgctcggtattcagtttgacgagcttttcacggacgatctttatttcaagatcagcgaaaaagccgtgcggcaggcaaagcgcattgcaaaagcgtgcgaagatgcaggctgcgcgttctttgccccctcgccgacgaaccagcagttccccattttcccggatactgcgctcgaaaagctcgcggaaaagtacaagtactcctattgggcgcgcgtggacgaaacacacagcgccgtccgcctttgtacaagctgggcgacgacggacgaaaacgtggacgcactctgcaaagacattgcgtccatcatggcagaataacgccggactgcggctttctgccccgtttagaggaggaaaacccgtatgaagttatttgaagaactcacccagctgcacggcgccagcggctacgagaccgccgttgcagactatattaaagaaaagttagccccgcttgctgacgacattaccaccgacccaaacggcagcgtcatcgcctattttaagggcacgggcgagcacaaaaagcgcatagagcttaccgcccacaccgatgagatcggctttcaggtcattaaaattgaggaagacggccgcattatgtttaaggagctcggctgctgctggacgtttacaacgtaccagagccgtgtccgcttccgtaacggcgtggttggcgtggtcgcaagccgcatcccgccggaaaagctgagcgccggcggctataagcgctataccgattgctacatcgacatcggtctgcacagcaaggaagaagttttaaaatacgttgatgtcggcgacgttgcatgctatgagggcccgtacacggagcttgcgccgggctacatcaccgcaaaggccatcgacgaccgcgtcggctgctatatgctgctggcggcgatgatgaacgtgaaaaagccgaagaacgacatctacctcgcgttcaccgtgcaggaggaggtcggcacgcgcggcgggcaggtcacggcgcagcgtattcagccggacatcggcgtcgcggtggacgtcaccccgtgccacgaccgcccgggcgatttggagggcagcaacgcgctcgaccacggcgtcgccatcaaaatctccgacaccggttccatcagcgacgaaggccttgtgaataaatccatcgcgctgtgcaaagaacacaacgtcccgtaccagaaagacgtcatctatgtcggcggcacggacgcaggcgccatgacgctcgtcggcggcggcatcaaaacgattggcttctcggtcgtcacccgctacacccacggcccgaacgccatcgtgagccaaaaggacatcgaagcgacggtcaaaatgctcgagctcttcatgaacgctgatttcgagtaaatttaaaagcacataaaatcagcggcgcacagagttttcacaccctgtgcgccgattgttttgtcttaatatcctgcttccagcttcggcaccgcaacaggcttaccggggtcgctgaaatcccagtgcatttcgtggcgctcgaagtagccgatgaccttaccctcgtcgtcgcgtgcggtcacaaaaaatcacctcacacctcatacggatgcgttcaaactcgattttaaaacctccgtattcagttctttgaattccatcattcttcctcctcatactccacgtccgggcgagtgatggcgatcggcacgccgttcacctgcacgcccgcgccggcgggaatgaggatgtacggtgcaccgtcaatgtagcgcgtctcgatccactcgctgtactcggggtcgacgcgaatttgcacctccggcgttttgatctcgaatttcttcgtctccacaaggttgcgcgggctgagtgccgcgtccgcgccgaactgctccgcgcaggcttcctcaaacttttcggctttctcgcccggcacgccgcaagcggtcagcatcgttttcatcgtacgtcccgtaatggtcagcggctccgggtccttgctcgccttgtgctcctcaatcatcccgcaaaggcggctgtgcacggtctgtacgacgtctaaactgcacgcgtcatttaaggcatcgcccaaaatcgtgccaaacgtcgttttctgctcctctgcgggcatgggcgcttcgcggttgaacaccgcatctataaattcatcgtagctttccgaagcgctgcggcagtagtacatggcgctgtaaatatcggcgctgcggtcggtgaacgacgggaacaaaaagcccagctgcggcgcggaaacaatccaatcgatgtcgcggttgtggaacgtattttccggcacgtcgtaccccaaaacgggctttgtctgcttcacggggcagacggtacacagaacgtaattatagatattctccgaggcgtcctccagcgtttcgccgtcctttgcgcggtacggcacgtcgtatgtatcgttcgcgagcaaaatgagatacgtaccctcgggtctgtatgatgcgatgaccttctcaaaaaacatccgtacggcttcttcatcggtaagctttgagtcgcgcagcgccatcagcagccggtgctcatcgctgtcaacgacctgcgcagtcgtaaacggcatttcgatgagatttttgccgagcgtgccggaaagcgtgcggcgcagcacggaaagcatattttcacattcctcctgcggcagcagggagagcggctggtcgaattgcgagacgatttcctgcttttcgttgacgtagcacccgcgcacatgggtgatattgcttttatccgccctgaatcggcggcgaatttccgagatttctttttcgttcattttgatatcctcttattctaaagtctaaagagtttcgagctctgcagagctcgaccaagggcgctgcccttggattccgccgcctttgaaaaggcgggcgaaacttttaaccgccgttgccgcgggctgtgcaaaactttgctatatcattttacccgtttggtgcacacctgtcaattcacttctccgtcccaaaaccgttgcgcgcgcccaaaatctgcggtaaaatgattttataattttgaattttctccgaaaggattcttagtatgtccacctcacaacctacccctgtccgcgggcggttcgcgcccagcccctcggggcgcatgcaccttggcaacctctgctgcgcgcttcttgcgtggctttccgtacgcagccaaaacggcgagatgctcctgcgcatcgaagacctcgaccccgaccgctgcacacgcgaaaaagccgagcttttaatggacgatctaacatggctcggcctcacttgggacgaaggccccggccatgagcgcacccacgccccctactgccaaagcgcacgccgcgagctatacgaatcggcgttaagtgaactccgcgccaaaaacgatgtttacccatgcttttgcacccgcgcagagctgcacgcggtctccgcgccccatgcgggcgatggcacgttccgctaccccggtttatgccgaaatttgacgcccgccgaagccgaagaaaaaagccgcacgcgccgcccaagcttgcgtttttgcgcaccggataaatccgttacatttgaagatctatactgcggcccgcaaaatataaatgttcagtccacgttcggcgatttcattgtgcgccgcagcgacggcgtgcacgcgtaccagctcgccgtcaccgtagacgatgctttaatgggcgtgacggaagtcgtccgcgggcgtgacttgctcccttccaccggctgccaaattcagctctttcacgcactcggccacacaccgccgcactacggacacattccgctgctcgtcaatcgcgacggccgccgtttaagtaagcgcgagcgcgacctcgacatcggcgttctgcgcacgcgtttcacgcccgaacaactcctcggccgcatggcaaatttacttggtttcctcgaccgcccggaaaaaatcaccttaacagagctcatcccggtctacaaagcgtggtatgaaaccgccgacacgccgaaattatggaaagattaacaggaactcgccctatctctccataactctccataagtgctacccgtattacctttttgggatttctactttccctaactcggcctatcactccatagcactccgtaagtttagtattacgatagtataaagaaaagccttaaccattcattcgtggtcaaggctttcgtttttactgtatttcttctatttcgccagtatctttgtttacatggtattctttaagaagcataccgctgaaaagcaattttgcgtcatgttcttctttgtcaacatattcatacacagacacatcgagcagatttcccatgacagagattttagttgttgtcttgtaattgaagttgactattgcatggatttcatcatcgctcttgaaatactctttgtagtagtccaaagcatagtcctgcatttcaatgttttctgcgattgaggcaattctccaattacctgtcacatcattaggaacattggtaaccacaaaggaaatatcatcttgtgctgtgctttcgttttgcttttcctctgtctgctgttctgctgaactgatagtgtcctttgctccgtcctcaacgctgtcttttgttccagtatttccgaagatagcggccagaataacgacaacgattacccaaaaccaccacttcttgaaaatcggctttttgactccgtttttggttgctttatctttcataatgccatacctccaagtttggttgatattagcattatagcagagtgtaacacaaaagtacagtataattttaactcactattgtgtcatagttttatgtgccttgtcaatactataatgtaattaaaatcaatggaggaattgcattatggagaaatttatcgtaacacctaaagaagataaatctgtcaccatgacaatacgcatagatagagccttgcaagaggaatataacgatttagcagttaagacgaatcgttctcgtaatgaactaatcagcatggctttgcaatatgcccttgaccacatggaattgaaagatgaatgatgactaaatgagagcctttggattttgtcctttggctctcaattatttatgcgttcaatcgtaagaactcatttacctttgttgctacttcctcttgctgttcctcaaagctatgagcatagatgttcattgtagtggaacaggttgaatgtcctaatgtctttgatatttcaatgatgttgacttccagataattgagcagggtagcacatgaatgtctcaacccatgaagcggaataatcggtaattcctctaatccctcggcctttgctttgtctggattattctgcacccattcattatagcggtgtaaatgctttgtgaaatactgataaggtgttgtatgccccataagctttccgtctgcttgaatgaacagattaccgccattgctcaaatcgccttgccatgcagtaccatgactaaatcgtgtctgtatgtactcaaagtgatactgcttcaaaagtgggattacatcatctggaatagatacctttctgacagatttctttgtcttaggctctttataatcaaatccgttttccgtcatacccacagactttgaaatagagattttcttttccttaaagtcaatgtcattccagtgcaaagcaagtgtttcgccttttctgaatccacagaacaatgagagagtaaagaacactttgtattgtgtaggcacagtataggattctgtgtactcattcacatagtatggtttacctgtatcatcaatacgctgatggcctttgtaggttacctcgtatgacatatccagagatttcataaacatcaatgcttgctttggagtaaagaactttaagccctcgtcctcgtcttttctctttggtttttgtgcgtcttggcaaggattgttctcaatcatgctgtaacgcttggctgtcttaaaaatcagattcaacacattagcaaatctctttattgtacctgcggaataatcgtcaaccagagttctataaaaggcttcaatgtgtggtgttttgatatgagcaatcttgtctcccttaaagtagggaatgattctgctttccaaaacctgtttatatcctgcataggtaccataagcaatgttatctttaacactctcaagccatttgtatgcaaaatcttcaaatgacattttttctgcgttgtagtcgtagccatatttcagtttatcttccatatccatggcatactttttcgcttctcgttcttgttgtttgggtgttgctgactgattgactgaatatgtaagattcttaaccagtttgtttccctttttatcgtatccttgacagataactatgcgataaacaactctaccgcttttgtactcaactcttttaacagatgccattcttaacaccctttctcaatttgatttttgtaacgatagaaggtcggcttcgtcatacctaattctttcatcagttcaaatggtttcttttccccttgctgtactaagcgatagtgggtagcaaattcttcaaggtccataactcttggtctgccataatcgtcccattctccacgagcctttttctgttcaatgccttctcgctgtcttttctcttttttctcaatttcagcctgtgccatgcttgcatacaactcaatcatcatattattgatagtctctaacatcatacgagccattgagttttccatagctgacaggtcaatcaatgttgtgggtaattctaacaccataacacgaataccgttgtccttaaagaatcgtaattcctttagtgtggcttccttgtttcgtcctaatcggtcaagctctgtgacgatcagcacatcaccactttcaagaatttcatctttcagcattgtgtagcgtggtcggttgaagttctttcctgtctgttggtctgtgtagaccttgcccttatacagagaaattgcattatcagcacaatacttggtgagttctgcaattcctctgtctaagtgctggtcctttgtgcttgtcctgtgataagctacatatttcattcagacacccccttatcgtataaatcacagtttccaccatcaataacggtagagggcttttcttcgtacatctcacatttagaaacattgcatggcatattcgtatcgtcatatttgtataggcaatccgtacacaccaaatcagcgtttctgataagctcaaactttagcttgtcattcttaaacttatcgttcatctgaacacctcatttctttatcgaacacctgttcttttccgatttaatcatatcaggcaagtctcaaaaagtacacactttttatgagaataatcaaaagtttttacgcatactttctgatacttatttgaggtttcatttgcatggtttcaaaaagtataaattctgataccacatcaacaagcggccattgctcgctgttttgctctgtatcttttcatggatttactgattcgtgcgttacgagtgccatagcttgaattttccttatttgtcataagttccagattgtcaatgcagttgttggctttgttttcgtccttgtgattgatttgcataccctctggaattgcacctttatgtgccatgtaaactaacctgtgaactctcatgtgctttttgataccctcatcattgcacacatcaacctgcttatatcctctatgggtaaagccttgcggtaagagtctgtcactcttaaggctgtaaacctgcccgtcagtagaaataaggtactttgaaaatccctcggcttgctcccattcaatgggtgtattgcttttatgctgtgttgtctccgtcattgccctcaacctccgtttcgccggtattgagaaactcaatgaatttatccacattcacaagaaacttattaccggacttaatatgcacgattttgttctgtttgcacatctgccaaagtgctttatatgaaataccagattcatccgcaagagtctgtaaaggcaccatacgaggaatgcgtacatctgatacaataaagttaaactcctgctctggtaaagtgttcgtattgtttgcattattcttctttgccattttgtattctccctttcgattagggacacgaatacaaattcatctgaactattgtattgttgtccatgtttttgtgtttgctccatctggacaactggactattctttagtgaccgatttattttattctcaattttatgtttatccccagaggttctctgttgacttctggtgaacttttatcctataccataggaatacattaccttatgacttctgattcaatctggattatcctgtgttattctgggcttatcctttatgctgtctgttcgtctggattccatgcggaaggcttcttaaacgcattgacctgtttttcaatgtttctaaggtggaatccctgcatatacacagaagcaagcccttgttcagcttctttcagttcagattctttcaatctgtcaaaagcctgttcagcagaagatttactaccctcaaaagcacgctccctaatctttgcagataccatatcagcataagcaggatatttaagcagttccagaacagccttgctaccgataacaccagaattgatagaatctgtcaaaaccttagtaatacggtttgcatgattgctgttcatcactttaggcatctgagacataagctgaagtgctttgctctgtactgcctgtgtatcgtcctgttcgtttgcatagtcataaccacgattgcggatttcctcaaccctgttattcatacggtcatacacaaaagcattttcagcaaccatatcctgcaatttgccctggagtttttcatagatttcatttaccatgttcttatctacacgcttatacacagaaataaaatctctgacacttgcaaccagaatacgcacatcatcaatggtctttgtttttctgaactgttcaagcagtttattgtagttctcaacgatagtcagcccgttgtttgcaatagtattgactttagccattttcttcttcctcccattcgatattttcgttttcgtctgacacaatcacaaagccttgttccttgtagaatgtatcatacgcaccttgcgttacctctgtggtaactgttccgtttgtaatcttaaccataattattcgtcctcattttcatctggggcattgttccattcatcttcccagtcatcttcgttccagtcctcgttttctttatcgtatggaacaatcctaatcacagtaggagcagtatcttctgtaccgtctaaaagaaaagcagtatttgcaccataagccttgtcaatgatgtacttacaagcattgaatcggtccttgttatatctgtcattggcaatctggattatgctttgcagagcttcaacggtagaagatttaagcaacctctgaaattgctccttttgtgatttctgctctgcggtttgcttaggtctgccttttggattaccgctttgtcctttagcataaggcatagaaaatcactccttcctacatatcatagatgttcacgctccttgttgtaggattccagttctctatgaatttctgttttactttgtcttgtgagagatgagataaaatctcttgtttttcctgtatctctgctttgagagatgcgatcagcatattgtaagcctgtgtccccgttctgggtttgtgcttcaatgtaatgtctgctgatatgcgttctacctgcattagtgaacacccccttattgttaatgtactgttatctatctgtgtatctgtctactttatagacactttttgaaattcttaatttgctcaaacacatcaaataatggcttctatacactcataaatgctgttttacacatagattttgagttttgcactttcttgattttggggtcgcagggtaccaattattagtaccttagaagccctcttttataatgaattgtgcatttgctttacggttcgtattacatcttctggcataccaaaattgttttcacgataatatgcaatgacctgttttgacctgtcgccctgtttcttaaacgcataccattttttcaatgccttgcgtagcacctcaacatcaacaatacattccttgcatttgtataaagtttcactaatttctttaccagagttagaggtcgtcaaacattcaaacacctcttgcacacaaccattcagcataggtttaatgttcttttcgcatatatcagtaaatgtttcttggtattggtcaattagctttcgtaaagactttcttgtgagaatatcctctaatgacattctatcggcatacatactatcgagcattcgttctaagaatacaaactcaacacgaataaggttgctttccactaacggatttcctttatcattttgttccttagacttgttgtaaactttcaaacggtaataatggtcttttctgtatataatgctgtcttggtccttacgaaaggttttctttttgtcccttgcttcctgcgcaataaaagttttgtcaactgatttctcaaacagattgattacatctttcggtttgcatttgcccacacatttaatagtaatgttgcactccatgcttgacacattcaactgctttaatatctcgttggagtaattacctttcatgtgtttttttagatatgctttcatgtattcgataaccttatcactaatcaaatctatctgaatacaatcagataactgaaatggttgaatgttgtttggtcttactgcgtgtggtagatttacataagcagagactttaccacctaagcactcaatccatgcaatatctttgccagattcattagttagagtttcctttggaaatgttacagtttccaagccttttattgtaagttgcatttggaagttgattccgtctgcaccttgtagttttttctttcccattttcacacctcgcccattgctttctttatgtctttgattattgaagctgtttccttgataattgcttcgattaaagcaatgtagctttcagcataataatttctttcgtcagtctttgctccgttcatattcaatacctcacattctttgctcacatatattcatcaatgcaattcacatcaatgctgttcaagatttcccttaacttgataaactcttccttagagaaagtgataccacgcaaaggatattgcaatccgtctctgtcagatactcgccatgctctaatatcaaacacaggcttcttgtcgttccactttacaatcgacacttcctttgagaatccacgaaagcctaccataatagtgtcaatatgttcctttacttcgtactcggtaaccttaccagcattacacgcaaattcatgcttatttgttttgttatccattttccttgttcctttccttttgattttaggcaacaaaaaagagaagccagttaaacctcgtctaaaggtaactttgcttctctaagcattcaaaatattaaattaactggtcttttccgacctgtatatattataccacattattttctgaaagtacataggcaaaataaacttttttccttatttttccgactattttcttgaggtcctttttatatataatcctcagattaaccagattgaccccagattgattttaatggattaacttatattttatatatcctattcctaaaagtcaattctggattatctgggaacttctgatgataccccttaaataaacagtaatacaatagtataaagttgttatgcctatccacaaaatacaaagagaattaagggcaaataaaccgaaactcatttgttcaactttgcattgtgcagtatgagagataattgtcataaaagcctttaactgcaatactttgttgaccttttctgccttgccaaaagtgaaactcaatgctatgctttttctatattgcttgtgatgtcagtattacgcttgctgaacaaacaagcacaatctccgaaaaattgcgttgttcccgacaatttcgccataaaatagcccgcaaatttttcatcgcatctcgcagcttcacggacgagggcaaaacgttgcttgagcacccgcttgacaacagcacaaagtgctactcgcagctcgactgcggctgggcacagaacggcggcggctcccccccttcgttcatacgcacgaaaaaaggacttcttttcggaagtcctttttgctgtctttaagttgtttacgccgctttcttatgacgtccatgcttttccataaacgccggcaacgcttccatgccctgcggcgtaacggggcgcacccatttgccggagtacatgtgccgctgcatcaaaatgagacggatcggctcgtcgatatagcagcacgcaaacacgataagaaacggcgctttccacacaaggcccgtcaggcacaccagcggcagcaccatcgcgtacataaacgcaatttcgcggattgtgccgaacgccgcgtctcccgcggctctatacgtatcgttctgcacccagttgcacatgcgaataaccgccgccacgcagtagatcatcagcatgtgtgaaccgatctccatcgattctccggaaagactcatcgcggaaagcagcggcttgtggataccgagcagcaccagacatacgcacaaaatcgtgctgccgcacaggaacacaaggcgttttgcgcgctcgtaggctgcgtccaactcgccggagcccacgcatgtgccgaccaaaacggaagccgcatttgagaaaccagcaaagaagctgataaccatgccctccagcgtgcggaacaccgcgatggccgcaatggcctgttcggattgtctgcccaaaacaacgttgataaccatgttgcccacgccgatgagcacttcgttgcagatgatggggaagcacttgacgaagtagattttcacctgcttcttattccagcggaaatgctttttaaagtggaacagatacgggtacttctgtgcacgcgccaaaatcaaaatgaccaaaacgttgataaccgccgccaaagatgttgccagcgccgcgccgcgcacgcccatctccggcaagccgaactttccgtaaatgaacacccagttgaggaaaatattcgatgccaccgaggcgattgacgcgaacagcgggatgcgcacgcgctccgtagaacgcagcaaagcgctcatcgccatggaaaacacctgcacagggtaaccgaatccgatgatgcgcagatattccgcgccaatcacctgaatgttctccttatccgtatagagcttcatgacggtttccggcgcaaaaatcgcaaacgcgccgaatgtaagccccacgatcatcatgcaggtcagcgtcaggccgtaggaatggtcgatgccgtcgtcatcctgcgcgccccaatactgcgagaaaaacagcatgccgccgccgaaaaagccccagtagcccgcaaacatcagcgaggaaaactgtgcgcaaaggcccaccgcgcccacggtcgtttcgcccagcggcgcgatcatcatggtgtcgatcatgctgccggtcgtcgtcagcatgttctgcaaagccaccgggatcgcaatgatcgcaaggtttttcagaaattgtttccacgcaaagcgtgtcttcgttttcattgtattttctccccaaaactctaaaattcggcccgcgaacccctcagtgccgcttgtgaatcagtataccgtatttcgcgacaaacttcaatccttattccgccgaatttccctgctttttataacaatcccgacatgttttcaaccgttttaaagcacgcccacaaagcaaaaattgaccccctgatacccataaagcaatgacggaggaaatgtcggcttcatgggccttcagggggtcggcaagtgtagcttgtttattttgttgtgcgcagaggctttacttcttcggctgaatcagcgggtggaagcacatgacctttctgacatcgttcagataggtttcgcccgggcgcgattttctgcattcgtccgtcgcataggggcagcgcggtgcgaacttgcagtaggtgatggaatattccttagactccatatccggcaacgccatgtcgtcatccgcccacttgtcgccgatacgcggcacagcgctcatcaaaagctccgtgtacgggtgtgcaggctcgtccatgatctccttggccgggccgtactcgatgagacagccgcggtacagcgttgcaatgtaatcggatacatagtatgccgtggaaaggtcatgggtgatgtagataaaggagaccttgtacttatctttcagctccttgaacaggttgacgatgttcattttcatggaagcatcgatagccgcaaccggttcgtcggcaatgatcagcttcggacgggtgataagcgcacgtgcaatggaaacacgctgcagctcgccgccggagaactgggtggggtatttgccctgtacgaccgccagagagagaccgacgctcttcagggcgtcatctacaaggtttgtagcttctgctttgtttttcgcaatgccaaggcgcagcgccgtgttgaacaggtaagagtctaccggcttacgtgcggagaaagactcatacgggttctggaaaatcggctgcacttccagcttgaactgctttgcgttgtagcttttcttatcgcggtaagatttgccgtccagcacgatgtcgcccatatccgggttgtgcagacgcagaaccatcttacacagtgtggacttgccgcaaccggattcgccaacgacggagaggatgaccggcttatcgttgtcgatggaaagcgtaacgtcgtcaaccgcaacaagctttttgccacgaatcataccgcctacgcggaagattttgctgacgcccttgatttcaagcaatttatcagccattcttctctccctccttcttcagcaaatggcaggctgcaaagcggcccggcttaacttcaatgaactccggaatctcctgacggcaacgatccgtagcatgcgggcagcgtgctgcgaaacggcatcccggaggcgggttcttcagtgccggcggacgacctggaataccgaccttctggctcttatcgccaacgcgcggcagggagtcaaccagcatcttcgtgtacggatggatcggatcattaaagatcgcatcggtcgggccaagctcgatgatgctgccggaatacatgatcgccatgcggtccgtaatctgataatgtacgcccatatcgtggctgacgatgaccatggtgttcttgagttgcttctgcaagcgcatcagcattttcaaaatacccttctgcacaacaacgtccagagcggtggtcggttcgtcggcaagcacgacattcggggacataaaggtcgcaagtgcgatgataacacgctggcgcataccgccggaaagctggaacggataagattccaaaatatccggggaaagattcagctcctcgaggtattttgcaacccgtgcgagggtctgctctttcgtttcgttcttgcggtcttcctgcgggatagaatccaaaaactgctttttcaggcgaacgatcgggttcagaacgctctgtgcggcctgcggaacgtaagaaatgttattccaccaggtcttctgaatgtttccggattcataagaaaaggattgtccattcttttcgccgctgaggataactttacctttgtcgatctccagcgggaactcgataatatcgtagagggtcttcagcagtgtggtcttgccgcagccggattcaccggcgatgccgaatatctcgttatcgtggatctcaaagttcaggtcgttaaggacgtgaacgtcaccgtcgatgagcttgtaagaagtggacagattttcgacttttaacatattcgttacctgcctctcttcatggataagtaatcgttatagcccgtaatgagtaagaacaggccgacaaacagaataaccgttgcaacgatcggtgcgccgatccagagatactgcttgttgaaaattgcgttgtagcttcttgcccactgaatcatgttaccgagagaaacaaggttgccgggggaaagacccagaacagcaagactcgactcggaaccgatagcggaaagcgtagcgttcataaagttggagagcgaccaggtcagcgcatacggcagaatctcggtcacaacgatctgcaccgtgctttcaccggagaacttcgccgtgtggataaagtcgcgctctttaatgctcagcgccatggaacggatctggcggctcggccaagcccatgcgaacatggcaagcacaagagccatcacgatcgtggtggagctgcccttcatcagggaggtcatcatgataaggatcggcagagacggaataacaacgaacgtatccgtaacaatcatcagcacgcggtctaaaaggccaccggcaaaaccggaaagcagaccgacaaaaacaccgacaaccgtgccgaggaatgccacgatgagaccgatgacgagcgagttgtggatagcttcaatcagcagccacacaacgtcctgacccatactggtagtgcccagccagtgttctgcggaagcacccagcttattcgggtaggtattgaacgtgaacgggttcacgtgcggtacatagtaaacaacgaaaccgatgataaagaatatcagggtcacgataagaccgaacttcaggcggaagttggctgctttccaaaattttgcaaattttttcattacaacttccctccttatcaaccgtaacgaattctcgggtcgatgaacggatatataaggtcaacaaccaacgtcgccgtggaaatcgccacgatggaaatcgtgatacatccgaggatcatgttgtaatcggactgcaaaatcgcattttggatcagcgtaccgacacccgggtaaccgaagatgatttctgtcatgatggaaccgccgaagacgccgccaaggctcatggccaaagccgtaatctgggtcaggatggagttacggaaaacgtagcttgcaccgatcttcgcttcggaaatgccgcggtaacgtgcatataaaacgaagtcttcttctgcagtcgtgccggcaagggacttcatagagataatccaccagcctgtgccgagcagaagcatggagatacccggcagaacagacgctttcagaagcgaaccgagccactgtgcaaacgtgccgcgggtaagcagcgttgtctggattgggaaccagccgaggacgaacgcgaagacaatctgcagaacaagagcgacaaggaagtacgggatcgggtaaatgcagatcgcgatgccttcgagaattttagaggatgtcttgttcttgcggaaacctgcaagcaaaccgataaagttgccgatgatccatgcaagcagcgtggtggtcagggacaaaccgagggtgtacggcaggttacgaccgataatagaggtaaccggctccggatagctcatcaaagacgggccaaagtcaaactgcaaaaggccatgcagcaggaagtagccatactgctcaagaagagtaccatcgagaccgaattgaattctaagttgttgacgtagcgcttccatttctgccggatccatgttgccggaacgggattgcatctgggcgatcatgttctcaacaggatcggaagggaacatacgcgggatgaagaagatgaacgtaacgccgatcaagatcgtcaacgcccacgcaaggatacgctgtaaaaagaatgttttgaatttcacagccacacttccttatcttatagacaaattacaacaggatattttgggaaatgagaaagaggatgacggacgtggtcatgggtattcggcacacgccctcatcctcttcagatcatttcagattagtgctattggattttctccaagtattcaagctatcaaattagccctgaaccggctgaatgttcggcagcatgtacttgaagcagctccaccaccaccacgggccgttataagcgttctcggcgttcgggtagccttcccaatatgtgctgttggtcggaacgaactttgtaccgctgaggaagttgattgccggcatttccttaacagcttctttcaggaattcctgatgcagctcataggatttgtcgctggtcggatcaacgcctgcgagttcggtaaggatctcgtcaaccttctcattcttccaacgtgcgccctgaccggaaccggtctcgccgagcggcttcatcagacggctgtcccaaccgctgatagcggagtagaagtccttcagaataccagcggacggccagtaagtgccgatctggaagttgccctgaccaccgtcaacgtcccaagtagcagtactcttggaagtaatggtgcaatcgaggccgaacgcctgcagctggttgtaagcagcctgagcgccgcgagcggactgagcttctgtatcagcaaggtagctgatttcagttgtgaacttggaaccattgaagtaccagccgtcgtccttcttctcaaagccggctttgatgaggagcttttcagctgcttccggatcgtgcttccaccagcctgcgccgaacatatcgatgagctcttcgtcggtgccggtaacgccggtcttctccgccatgcgctttgcatagccggtgtcgtacggcttaatggtggtgccatcgccaaggtcaagctcaaagttctcaagccattcctgcatcgggatggtgtatgtaccctggagatactgggtgttgttgagcagcggaatcggagccgcacggcctgcgccggagaagatgttcatggagatctggtcgatatccagtgccagaacgatagcccagcggaagtcagggttgtcgtacggagcgccctgaccctgagagaacaccaggccctttgcgcccgggtcgtccatggttgcatacgggaactcgttgtaccatgcgttgatcttgtcgttagagctctgcattgcctgcagctcttccatcgtaacttcgcagaggatatcaacttcgttgctgaccatctgcatctgtctggaggaggagtcgccaagataacggaaccaaacatattctgccggaacctgatcttcgctgtagttgtagtgctctgtgcctacaacgccaagcgtactttctttccagtcgtcacggagcttgtagaggatccagtcgccgttggagtcatagtcttctacggtgtacgggcctgctacaaccggctgctcgtccttataggtcgtaacgtcagcctgctgggagtaaatgtgctcaggaacgatgcggtaatcggtgccccatacggtgatgccgtaacgctgtgtaaagcgcgggaaggattccttcatcgtgaacttaacggtgtaatcgtcaaccttctcaaccttatcgatgtagaggttggtcgctgcggaagcaccgatcttatcgttttctttgatcatgttgaacgtgaagacaacgtcgtcagcgttcaggtcttcaccgtcggaccacttgatgccttcgcggatcttaacggtccattcggtaaagtcttcgttcggggtgcccatatcggctgcaatttcagggaactgctcaccggaaacggtgtccatttcccaaaggtgtgcgctcatcagctgatgaataccgaagcccatgttcgtaccggacatgtagctgttgaactggcccggagtgtcggtcggagacgaagtctcaacaatcagagtttcgtcacggttcgtgccaaccgccgtaacctgacctgcggcggcattcgtgccggagccggtagattcggaagcagaagactcactcgcggcgctgctggtgctgtcggtggagccggaggatgctgcactgcttgtgctgccgccgccaccgcagccgctcaggatgccggtgacgagcatggccgccgacagaagaacagctaaggtctttttcttcataatacaatacctctcttgttttgtgaacctgcggttcataatgtgttgagatcacaaagcataccccactttgtgatccccggtgttttgaattcctacaaatcgcaaaatttataggaatcccgccatgaactttgcttcgcaaaattcatgaccccctatttatcttacagcgcttgtccgttcactgacgtacctttcccccacacgctcgcctttttagcatccggtacggcgatgtgtgcatttcgctgaaagcggcggtatttagaacattcaagctctgcgatagcatcggtctattgctccatagccgaagaccaacgctaataaatagctttaagctgtagaaccaagtgaaaaataaccaaattttaattccgttctcgttttttatgtacatagaataacaccgtgttcacgatttgtcaataagttttcaaaaacttttcagtattttttccaaatatttttaataatgttacttttataatgccatatacaaaaaaaagtgcattttggggagcaatgtgaaatcggtttcccattttaaaattatgtaattttaatgtgcttatatgcttttgtacattttgatattttaaggcgcacaagcctgcgctttatagtcattttcaatagtttcaattacaaacatttcgttttcatccgctactcgttctaatttcatcaatattatgtttactatttctatttattttaaaccaacattgtctatactgtcctacagcacccgaaaaaagggttaaaaaacggctgccgcacccggcacaccgttcttttcaccctatatcctttgtcctgtggcttatactctgttttataggtctccattctatacacctatattcttataagtgtacatttcggcgactgaaaccgtttcggcatttttaccaccgacttctctgaattcaccccggcaaacgagcaccgcagtatagaaaacttaacgcatgtttggaagctaagcgcccagctttcccctttatactccaaagcacaattttcactatttttctcaaacacttttcaaattcttgtaaactgtgttataatggtaaaaatacttggccgaaaggccgctttgcgcaatatacatggatattgcacaggaggtaaagttgtatggaacagaaaaaagattgggtgaaggatcttatcgtgtatcaggtctacccgcgcagctttcaggattctaacggagacggtatcggcgatattcccggcattttaagccgccttgaccacctttcggcgctcggcatcaacgcgctgtggctctcgcccgtattccgctcgccgaatgacgacaacggctacgacatctccgggtaccgggagatcatggacgagttcggcaccatggaagattgggacgcgctgtgtgcagagtgccacaagcgcggcatcaaggtcattatggacctcgtcgtgaaccactcctccgacgagcatccgtggttcctcgaatccaaaacctcgcgcgataacccaaaaagcgactactacatttggcgcgacccgaaaaacggcaaggagccgaacaactgggcctccgttttcggcggcagcgcgtgggaatttgtaccggagcgcgggcagtattactaccatctgttctccaaaaagcagcccgaccttaactgggcaaaccccgcgctgcgtgaagaaatcttctccatgatggaatggtgggtgaaaaaaggcgtggacggctttagagtggacgccatcagctaccttgataagccgcaggatttcccggattccgcagagccgccacagccggacggctattcgttcagttcgagtctcatcaacggccgccccggcacgcacgcctatatccgcgacatgaaccgccgcgtgttctcgccatataacgtcatgaccgtgggcgaagtggcgtcgaaagacgcagaggagctcgcccgctacgtcaacaccgaccgtgaggagttcgatatggccatcccgttcgtcgcgccgatcgtcgagatcaacacgtggtcgccaaaaaaaatgaaacaggatattcaaaacgactacgacgccttaaaggaaaacggctggtgggcgcggtttttcagcaaccacgataagccccgccaggtctcactctatggcaacgacaaggaatactgggaggtttccgccaaaatgctcgcaatgctgctgcactccctgcccggcacgccgttcgtgtatcagggtgaagagattggcatgacgaacatgcgcttcccgtacattgaagattacaacgaccccgatgcaaagaacacctaccaccaacacattttggcaggcgacacgccggacgtggctttaaaagaggcgcagatgatctcccgcgacaacgcccgcacgccgatgcagtggaacgcaaccgaaaacgccggcttcacaacaggcaagccgtggctcggcatcaacccgaactacacaaagatcaacgcggaaaaccagaaaaacgacccgcactccattttcagctgctacaaagcgctcatcgcactgcgcaaaagcagtcccgcgctctcacgcggcgacctcgaaattccggaaaccggctccgatacgctgttcgccctaaagcgcagctataacggcgaaactctgctttctttccacaatttctccgccgaaccgtcgaaaatccccgccgcgctcgttccgcagaacggcgaagtgctgctctcctcctacgaccgcgagggcggctacaccggccccaatctgcgcccgtatgaatcggtgattttccgcgtataacggcggtgcagcatgacaatcacgggttaaaaatccatgcgaacacaacctgttatgctgtttttcccccaaaaatgaaactatgcgaacagagattgtgcgtgttttgattttttaattcccttctaattcaacgattatccctgtaatttaacgaatgcctctgtgatttaacgattacctcagccgtttaacgattatgacggcacaggaagcctcaatccacataaaacgcacaaaccccgccgcagaattgtcctgccgcggggtttactcatgtgctgaaacaaccgaaaagcctaatttcaagcggttttcgggcatagaaaaagtccaccgtaattctatcaaaattacggtggacttatggtggacccggagggattcgaacccttgacctctgcgttgcgaacgcagcgctctcccagctgagctacgggcccatattctgttcaacagcaaacattataacacagtctttcaaaaaaatccagtcctattttttatttttcgcaattttctgtatgcaaaaagggccgaccgctttgggccgaccctttcctcacaaattattcgtttattttgccgctcatgatatcgaaacgcagttgatcgtgccgcaggatggtccaatcggccatatagccgaaatcggagagggcacgcgaggaaaatcacacaccgccgccggcttctttgctgatggcatcgatgaaggcagggatgagctgctttttgcgagagacaacacctttaagccagatggtgcccgctttcggcgcacggccgaaggcatcttcaacgagcatatcggcggactcgccgtagcacatgaggcgcgtggactcctcgatgatattcgtcagcatgaagaacatcatggaaaggccgtgctcgcggcaggacttttcgaggtacgggcgcaggcggcgctccagctcatcgagctcggagccgctcatgctgttgatctggccgacaccgaacgtgacgtcgccgaactcgaacttcttgtaatcctgatagaaaatttcttccggagtcttatccttgaggttgctgcctgcggtaaacatttcgataccgaagctctggcaatcgatgcccgcaatggcactgagcgcttccgctgcggcgcggtccagcatggtacaggtaggcgaacggaacatgagcgtatcggacaaaatggcgctgcacagaagacccgcgatctgcggcggaacctcgaagcccttttctttataaatagaatagatgatggtcgccgtgcagccgacgggctcgttgcggaaatacacaggcgccatcgtctcgagggagccgatgcggtggtgatcgatgatttccaaaatttctgcgttttcgatgttttcgaccgcctgactgcgctcattgtgatcgactaagatgacggagcgcttgcggatgccaagcaagttacggcgagagatcatgccgacgtacttgccgtttttatcgataaccgggaaatcgcgaatgcgggtgttctgcatggtatctttaatggcatcggtgtaatcgctcggggtgaacgtgacgagatctttcgtacgcatgaacgccttaaccggcatgcactggctgatgcggtgcgcaacggtgtacgtatcaagcggcgtagtgagcacggcgcagttattgtcgcgcgcgagcttctggatgctgcgggagacctctgcgccgaggcagacgaggatacagcccgcgccggactcaatggcggaaagctgcgattcgtaacggttgccggtgatgaccatgtcgtccttttcgatgtagttttccatgacgtccgggtttgcgacggcaatgacgacgttgccgtgctcgaaaacggcatcggggtcgccgacgagcattttggcttccagcgtttccaaaatgttgcagtacggcgttttggcttttgcaatcatggtgctgtcctgattttccatgtaggacgtggcaatgtcgttgatggtgatgatgccgtctaacacgttgtttgcatcgacgatgggcagcgtgacggcgttcatctctgccatcatgctccacgcttttttcatggaaatgccctcgttgatgccgggaattttgcggatctccatatcgcgcacgcgggtgccgatattgttgacgtaggtcggctggcgcatgccgaagcgctggaggacgtagcttgtctcggagctgatctgcccagcgcgggcggcgacatagtgatttccgtcattttctttatttttaacgtccgcgtaggcgatcgccgaacaaatggaatcggtgtcgggattgcggtggcctaaaacatagacttcttttctctcgctcatgcgtataccccactcaaggtaaaatgttgtttttagtatagcacagattttccgaaaaagaaagaaaaagcgaacggccgagggaaatttttgcacaccgttcgcaagattgtcgatttttgatttttgtcaaggcgccgtgttatttgcggtcgagcgtcagacggtttgcgttccacacggcaaaggcgagcagcgcggcaaacgccatgaggataacgggataaatctgcataccgagcaagtcgctgagcttgccgaagaacgcgggcatcgtcatgctgccgacataggcgcacgccatctgcatacccatgaccgcctgcgcgttttcggcgccgaaacgcacgggcgtttgatgcagaagcccagggtaaacgggcgcacagccgagcccgatgaaaacaaggcccgccaccgccgagaactcgaccggcacgaacaataaaaccgtgccaaacagcacgcagacgatgccgatcgataccatgcggcggtcgccaagcttatcggagataaagccgctgaggaaacgccccgccgtgatgccgatgtaaaacagcgaagccatggaggcggcgctttccgccgcaatattgtgccgcaggacgaggaagctgctggcccaaagccctgtggtgccctccaaagcgcaatataagaagaacgcgagcatggtgacgggtgcgccggtcattttcagcacacggcgcaggaaggatttcccgcctgtttcctccgcctcgcctgcgggcgttttctttcacagcgggcgcgagagaacaagcacgatcgtcagcgcgagctgaatgaagaacaccacgcggtagccggcgccgaaggaatagccgcccgtgaggcacgcacccatgatatacggcccggccatggcgccgagaccccagaagcaatgcagccaattcatgtggccggagcggtaatacagggcgatgtaattattcagagcggcatctacactgcccgcgccgagcccgtacggcaccgcccaaacacaaagctgccagaacgcgccggccgaagaaaagccgaatagtcccagcgccgtcaggccgacgctgatgaccgtgacgagatgcgtgccgagcctgcgcacggcgcggtcgctcatcaggctggagatgaccgtgccgcaggaaataatcatgctgacaatgcccgcataggacaccggaacattcatgacccggtacatcgtcggccacgccgagccgagcagggcatccggcagaccgagactgataaatgcggcgtagatgaccgcaagcaacaaagaaaacatatcgattccccttaattttttgtctttaaatcttcggataagaattgcaaaagcacatcggctttgctatactgaatactaatataacgtattttaacgatgtttcatagcaaaatcggtttaaaaaatacaaatatatcgtatatcttgacaaaatgcggaggacagcatgattccgaaattcagaatacacggcgacggcgcagagcttgtgccgtatacggtgccggagcttttcttttttgcgggcggacgcactttgtgcttcgacgcagcgcgcgagggcgacgccatcggccactggcacgacgaaatcgaattattatatgtaacggaaggcagcatggtgtacaatgtgaacggcacacgctgcacggtgcacgagggcgaggggatttttatcaacacgcggcagctgcatttttttgaagaaagccgttgcacctaccgatgcgtgctgctgcaccccatgatgctatgcgccaacacgtatttggaggagacgtacattacgcccgtgacaaaaaacgccgctttcccctgctgcatcttaaagccggaaaaagaaaaaagcggcggtgctttggcgctgatcgaggcgcttttcgacgaagcggacaaacacaatctgctgcgcctgcaaagcctttcctacgcggtgtgggacgagatctgccggctggcaccgaagcccgaaaacacggtttccgaaagcagccggctttcggccgtaaaaaacatgatgcacgccatacacagcggctatgcggaaaagctgacgctggaagagattgcgggcgcggggcatgtatgcaaaagcgcgtgcgaaaagctgtttcacacgtatctgcactgcacgccggtcgaatatcttcagcggtttcgcctgcaaaaggcggcggagcgcctgtgcaaaacggaaacgcccgtggcgcagatcgcgttggactgcggattctcgggcgcgagctattttaccgggtgcttcaaaaaaatctatggctgcacgccgaaagcgtaccgcagcagccgcaaaaacacgaaagcgtaaaaatgcaaaccgagccgtgctttttcagtcggactcggtttgcattttgtttcggatcacaggtctttctgcatgatgtagtcgttcatcacgaagccgctgccgatgtcggtgacgacggcgtccgtttgatgaaaaccgaagtatttgtagacttcgatggcgtgaaaattctttttgttgacggtgagatagattgcggggagtttttccgcctgacagagcgtttcgatgaaatcgaacgcggcgcgcggcaggccgcggctgcgatgagcggcggaaacgtagagcttgctcaggaacattttgccctctttgtgcggcacaaggccgatgaagcccgcgggcacgccgtcgtcgagcatcatataatagacgtagccctcgctttccatctggcggtggatggccgggacggactggaatttttcgatcatgtaatctgtggacgcaacgccgttgatgcagtcgtaggtctcgtgccagatgggtgcggcgatctcggctattttttcaatctgttcttcttccgtgactttgataaaggtaactgccatttttaactcagctttctttgtagtttccgaggaacgagaagcggggcatctcgtcggagagggcgcagatgagcgcaagtgtctgcacgtcgtgaacattcccggtgaaatcgaggtagaagtcatactcgaaattgcgctccgggatggggcgggattcgatttttgtgaggttcaggccgagcagagcgaaacgctccagcgtatggcacagcgagcccggggtgtgcggcagagagaagcacaggctgatcttttccgcgtcttcgggcaaaacggcttcacgcgaaatgacgatgaagcgcgtgcagttgttatcggtattctgaatatcggcggcgatgacttcaaggccgtattcctccgccgcctgcgcggagcagactgcgccgacgccctcgagacgggtttcggcgatgaattttgcggcagccgccgtgttggaataggcttcggtttcgatgtcgtgtgccgcgagatacgcactgcactgcacgagggcctcatgcttcgagagcacctttttgaccgcacccgtcccctttgcgcggcacaggcagtggcgcacgggaatatccgccgcaccgacgatgaacatgcggtgcttcatgatgaggtcatagacctcagagacactgccggcatcggaattttcgaccggcaccacgccgtaatcgcccgcgccgttatggacagcttcaaaaacatcgcggaagccgggtaaaaagatcggcttctgccccggaaacaggcgcagggcggcgctgtgggaaaacgcgcccgccgcgccctgacaaatgacacgcgggtcggcttttaatgtctttggggaattttgctcgaggtcgcgcaataccccgccgcttttcagcatattgtgctggcgggcgcgactgatgctcatgatggcgctgtaaagcgcgacggcgctgtcgccgtactcaccggcttcttttttaacgcggtctaaaatgacctgctcgcgggcggcatttaagacgggaatgcccgccttgcgcttgatctccgcgacgcgctccgcgcactgcatgcgttccgtaaaaagctttaaaagctctttatcaatgcggtctatatcgttgcgaaccggcaaaagcagttcatcaaaggacttattttcactcattttgctcgctcctttctattctctttaacgcagcaagtccatcagcgccaaggctgccgcagcttccgccacagggatggcgcgcgggacgatacacgggtcgtggcggccgtggatggttaaatcggcgtttgttttcgtggtgagatcgaccgtgtgctgttcacggccgatggacggcgtgggcttgacggcgatgcggaatagaatcggcatgcccgttgtgatgccgcccaaaatgccgcccgcgttgttcgttttcgtgcggacgagaccattttcgtcgtagtaaaacgcgtcgttattttcgctgccacgcatacaagcaacatcaaagcccgcgccgaactccacgcctttgacggcggggatgccgtataaaatcgatgcaaagacgttttcgatgccgccgaacataggactgccgatgcctgccgggacaccgactgcggcgcactcgatgatgccgccgatgctgtctgcgtccaatcgcgcggcttcgatctcggcgcgcattttttcttcggccttgggggaattgaccgcaaaaaagcgggtatttaaggcatttaagtcgtcttttgagacgtttacgggatcgaacggggtatcttttgcgctgccgaccgcataagcgtgcgcaccgatcgtgatgccgcggcgctctaatatctggcggcagacggcgcctgcgaacacgaggcacgcggtgagacgacccgaaaaatgcccgccgccgcgaatgtcatttgcgccgtcgtagcggacagacgcggtgtaatcggcatggccgggacgcgggtgaatttttaaatcggaataatccttcgaacgcgtattggtgttcgcgatgatagccgcgagcggcgcgcctgttgtgacgccgttgaagaggcccgagagcacctgcggctcatcggcctcaaggcgcgtggtggcggtcttgtccttgcccggcgcacggcgtgccatttgcacgcgaattttttccatgtctattttttcgttcggcgggagattatcgagcaccacgccgattgcttccgtatggctgccgccgaaaatggacagcttgatgttttcaccccaggtcgatgccatcggcgatccctcctaaatgtttatgatcccggaaaaatccggggtaggattttttgatgctttccgcgtccgtgacggtgactgtgcacgcacaaccggcggcagcgagcgccatgacgacgcggtggtcgttcatgccctcagttttgccgcccgtaagcgcgggcttgccgtgaatgataaggccgtccggcacggctttaatgtctgcaccgaggtttttgagcgccgcttccatggcaagcagacggtcacactcctttaagtgcaatcgctccgcatgggaaatgacggtctcgccctccgcgaacgcagccgtgacggcgagcgcaggcaccatatcgggaatttgcgcggcgttaatcgcgatgccgtgcaggccgcggtagggcttatctgtatttttgttttcggcaacataaacgccgttttcttcggtgacagaaagcccgaactgccgccagagatggacgcaggctttatcgccttgcagagaggtttcggaaaggccgagcaggcggatagggccgcctgagacagcggcttccgagagaaaaaacgcggcctgcgaccaatcaccctcgacggtatagtgctctgcgcggtacgtctgcccgccgcagatgtgccagccggtctcggtctcctcaattttaacaccgaagcccgcgagcacctctatcgtcaaatcgatatagcctttggattcgagcggggtggtcagcgtaacggtggaatcctttttgagcagtggcaaagcgaataataaaccggttataaactgcgagctgatgttgcccggcacgcggaaatcgccgctttgaagcttgcccgtgatgtgaaacggcagaccgccggcagtctcgaccgttacgccgtgctgcggcagaaggtctgtgtaaacgccgatagggcgctcgggaagtctgccgtgaccgacaaacgtcgcttcgatgccgagggcggcgaaaacggggatgagaaagcgcagcgtggaaccggattcaccgcaatcgaccgtgacgctttggggtgccgtgcccggcgcgatgcacagcacgccgttttcttccgctttcaccgtgccgcccatggcgcacacgccgtttaatgtagcttccatatccgcgctgtggtcaatgggcccgacacggcacggcgttttgcacagcgccgccgaaagcaatgcgcggtgcgcggcacttttgcttgggggaatgcgcacttcgcccttaacgtgggcggggcggtaggtcacctctgccatagtatcaccttgtttctgcataaatttatctctctatatttgacataaggcagcacgatgagaatgatgctgccttcctaaaaatcaattcaattttctgcggcggttctgctcggcggcgagtttatagcgcagcacgaggtagtttctgtccaccgggtgaataacgctttcgccgatctgctttaagaggatcaggttgagcgttttgccaaagctttttttatcgagcgcggttgcttccacaactttggcgaaatcaaatgcggactcggtgggcatgccatagctttccagcacgcggcggatacgcgcagcggtgcctttttccgtgacgccgagactttcacccacttcgcccgccatgaccataccgatgccgacggcaaggccgtgcgaaagcgacgagaagcccgtaagcttttcgagcgcgtggccgaatgtgtggccgaagtttaaaatcatacgccggcctttgtcgttcgtgtcttcctcgacaaagtgctttttgcacagcacgcagcggcagatggtttcctccaaatggtcgatgacttgtccctgctccaatttatcgaacagcgcggcgtctgcgatgcagccgtatttgatgacctcgcccatgccgtccgtgaaataggcatcgggcagcgtggagagcgttttgggatcggcgaggacgaggcgcggctgatggaacgcgccgacgaggtttttaccgaacggcaaatcgacacccgttttgccgccgacactggcatctacctgcgccaaaagggacgtgggcacctgcacgaaatcaatgccgcgcaggaacgttgccgccgcgaagccacccatatcgcccgctacgccgccgccgagcgtgacaatgatgtcgctgcgcgtgaaatcgttttccgcaagcgcttcgtaaatctgcatgacggtggaaagctgcttttgcggctcgccggcttcaaagacgaactccgccgtgtggatacccgctttttcaagcgaagcttttagacgctcgccgtatatcgggaagacgttcgtctcactgacaatcatggcgcggctgccggggcggacgagcggggcgattttttcgcccgcgcagtccaaaatgccgtcttccacaataacttcatacggtttatctgttttaatttcgatcaccattatccgaatttctcctttttttcacgtgcggaggaaagcagcgccacgagctctgcccgatcgtttttcgccaccgcatcgcgtatacgttctatattgcgcacgagttcttccgtctcgtccgctaattcctcacggtttgcaaggaaaaggtctgcccacagctccgcattgatgcgcgccacgcgcgaaacgtcgcggtagctgccggcggaaaagccgctgtgctcatcgcagcgcgggctcatgacataagcgcacgccaaaacgtgcggaatctgggacgtataggcgatcatacgatcgtgcttttgctgcgtgcagtatttgatggtgccaaagcccatgctttttgcgagcgacacgagggtgtctgtggcgctttgcggagcttcgccgggcacgagaatataggaagcgttataaaagaggcttgcctcactggcatcgaacccgctgcgctccttgcccgccatggggtggccgccgacgtaaacgaacggatagtttttggcgatctccgttaatttgccgcagacctgatttttgatgccgcacacatccgtgacaatgcagccttctttaaaatgcggtgcgttttcctcgacgaagcgcacgacatctgcgggatacagacagacgtacacgacgtccgcgttttcgagcaaagacgtgctgccgacggaatcgatggcgcctagggaaagtgcatcgagcagggtattttcgtcacgatcaaagccgatgacggtatgctctgtattttctttgagggcctttgcgagcgaaccgccgatgagacccagaccaatgattgcgatttgcatatcgttctccctttcgggtaaatttttacaggctcttcaccgtttcggtgaccttctgcactttctttgcgagcacgtcgaactgatccggcgtgagggactgtgcaccgtcgcacagggcgcggctggggtcattatgcacctcaatgataaggccgtctgcgccgacggctgccgccgccatggcaagcggctcgacaagccagttgatgccgcttgcatggctggggtctacgatgacgggcaggtgggaaaggcgctttaagatcggcacggcggaaatatcgagcgtattgcgggtgaatgtctcatacgtgcggatgccgcgctcgcacaggatgacctgctcgttgccgcccgccatgatatactcggcactcatgagaagttcttcgatggtgttggcaaggccgcgctttaaaagaatcggcttatgcacgtgacccagctcctttaaaagctcgaagttctgcatgtttcttgcgccgacctgaatgacatcgacgtcctcaaagaggtcgaggtggccgatgctcataatctcggtgacgatgggcaggccggttctttccttggcctttttgagaagctcgaggccctctgccttaaggccctggaacgcatacggcgaagtacggggcttgaatgcgccgccgcgcaggaacgtagcgcctgcggccttgacgcgctctgcgacacagcagatctgcgcttcgctttcgacggagcacggacccgcgatgagcgcaagggaaccgtcgccgatcacctgaccggtaggaagcttgatgaccgtatcttccggatggaacttacggtttgcttttttatacggctcctgcacgcgcttaacactttctacaatatcctgtgcggcgatatactcgctgtctaccgcagcggtatcgccgataaggccgagcacggtggaatgtgtgccgacccatgtgttaacactgacgtcataacggtcggtgagatccgaaatgaagtttttgacctgttctttactgcggttggctttgagtacgatgatcatgttttttcccttacctttctttatataggagccgtgccccgctgccgctctcggcacaaaaaaagcgaagcccattggctccgcttggttttatactgctcagaatacttcaaattcctccgcgcagaaattttccgcgcgttttcaagcgttgcccggtatattcacatacgacgaaaagcacacggtataaaatcgtgcgctaaaatactttgtaaatcgtcttgtgaataaaacggactgcatagtttgaaccatcctatatgtgactcttgctttgcgatttgcaggtttgctttatctatcctgcatcgccgtgttaaaatcataccgccgcgcgggcgctttgtcaagagttttcttgcggtgttccgggagaagttccttttttgcgtcttcttctgcggaagcgcttcttttgaggccgctccttttcggaggtatttcccggctttttgcgcttcgctttttcaatgggatcgccgcgcagggcgcaaatgcgctctacaacgacaaccgtgggcgcgccggcgtcgacgacaacgtccgcgcttgcgaggtatttcgggcggcgctcgtttaaaaggcgctcgatcaccgcgcggcggtccggcgtctgcagaagcgggcggcgtttatcgtttttgaggcgctcctgcaaggcggccagcggtacgtcgagataatagatggtaccgccgccttgatggaagccctctacgttctgcggctgcatcagcgtgccgccgcccgtggcgatgacgaaatgattactctgcgcaagctcctttacggtctcggtctcgagcgcgcgaaaatgcagctcgccgtattctgcgaaaatctccttgaccgtcatgccggtcttcttttctatgtacaagtccatatcgacaaactgcatatcgagcgcggcggccaagcgacggccgaccgtggtcttgccgctgcccatgaagccgcttaaaacgatattgcccgattttatgatttcaccttttacttttttgtccatttcccgttccccgtttctttcggtttgttatgcgcggaaaagccgtgccgtttccgcttccgcatcgcagatgagctgttcgatatcgctgtccttaaacgacgcgccgtaccagagctcgtgcgcggcgaccgcctgacagacgagcatgcccatgccgccgacagttttgagtccgcagcttgcggcaagctttaaaaatttcgttttgccggggttatagacggcgtcgaacgcggctttgcagcgagagagcacgtcttccccgacagcactgacaccggttttggggtacataccgaggcttgtggtgttgagcacaagatcgtagtgctcggtttcctttgcgagctcgtcataagacagcacgcgaaacacgccggttttgctgcgcgtgcggcagagctccgcgagttcatcgctgagcgcctgtgctttttcgagcgagctttcgcggcagacgatatcaagatgcggtgcatcggccgtgagcacggcttcaaatgcgatagcacgcgccgcgccgccgcggccgagcagaagaagctcgccgttaaaatcgagcccatagcgcgcaagggcctttttgcagccgacaccgtccgttgtgtagccggtcattttgccgtcttcgacacgcacggtgttgacggatccgaaaagcttcgctttttcgtcgataccgtcgagcaggggaatgatgtcgcttttgtgggggatggtgatattaaagccgtcgagcgtgcgcaatgcgggcagcgcctgtgtaagggacggtacatccagcacggaatattccggcttatagcctgtgagggagaagaggcggtcatggataaacggcgacatcgtgtgcccgatggggtgcccgatgacggcaaaacggcgaagctgcattttaaggctctcctttaaaaacagaaaaatttagcacggaatgcggaattgctattgacaaataagccgtgcatccatacaatgtatgtgaagtacaccccgattgtatcatgcctgcggcgttttgtccatacggcagacggtgcagtacttgacaaatactacacgataggaggaaaattaaatggttctggagaaagttatcgatattattgctgaggagctcagcgtagatccctccgagatcaccgaggattccaacctggttgaggatctggacgcagattcccttgctgttgttgatcttgtcatgtccatcgaagatgctttcaacgtagaaattccggatacggaagttgaaaacctcaagacggttggcgaaatcgttcagttcatcgaagaacatcagggtcagtaaattttacgccttgtgcaaaacgatatgaaaacaccgggagcggctttctggctgttcccggtgttttttttcgctgatttaatttgttccgatggacagctgttttgttggtactctgtttctgcaaattagtttaaactaacttttaattatttatgtataagtatctttggtacaaattgcaccgaatagtacaaggaaagaagaaacgaaccttcttttctgtttttttaaataaaatcttaggcggcccgcacaaagatggctaccgctcttgcttttcagaaaaattccctgtataataagaaaagatatgcccgctttgggcccggcggcacagcgtttgccgcacgaatcgtgaaaggactgaatttcttggcgaatcagaagaagatggtcaacgacatcacttccatggacgttgacttttccaaatggtacaccgatattgttaaaaaagccgagctgatggattactccagcgtaaaaggctgcatgatcatcgagccgtacggctacgcgatctgggaaaacattcagcatgaactggacgatcgctttaaggcgacgggtcaccagaacgtttacatgccgctgttcatcccggaatccctcctgcagaaggaaaaagaccatgtaaagggctttgcgcctgaagtggcttgggtaacggaaggcggcaacgagaagctgagtgagcgcctgtgcgtacgcccgacgagtgagattctcttctgcgagcattaccagaagatcatcaactcttaccgcgacctgccgaagctctacaaccagtggtgctccgttgtgcgctgggagaaaacgacgcgtccgttcctgcgctcctccgagttcctgtggcaggaaggccacaccatgcacgaaaccgcagaagaggccatggaagagaccatgcgcatgctgcacacctacgaggagttctacaagaacgtgctcgccattccggctgtgaccggccagaagaccgagaaagaaaagtttgcgggcgctgtggcgacctacaccattgagccgatgatgcacaacggcgttgctttgcagggcggcacgagccactacttcggcgacggctgggcaaagaacttcggcattacgttcacgggacgcgacaataccctgcagcacccgcaccagacctcctggggcgtttccacccgcatgatcggcgccatcatcatggtacacggcgacgacaacggtcttgtactgccgccgaaggtcgcgccgatccagctggcaatcatcccgattgcacagcataagcccggcgtgctcgacaaggcaaacgcgctgtatgaatccctgaagacgaagttccgcgtgaagctggacgacaccgacaactcccccggctggaagttcagccagtatgagatgcagggtgtgccgctgcgtttggagatcggtccgaaggatattgagcagaaccagtgcgtgctcgtccgccgcgacacgagagagaagattttcgtttcgctcgataaccttgagggcgagattgaaaaggcactgcaggctgtgcatgacggtctttacgagcgtgcgctgaagaaccttgaagagaagaccttcacggcgacgacgtatgaggagttcctcgacattgcggaaaacaagcccggcttcatcaaggccatgtggtgcggcgacagcgcgtgcgaggacaagctgaaggacgcgaccggtggcgtgaagtcccgttgcattccgtttaaggaagagcacctctctgatgtttgcgtttgctgcggcaagccggcaaagcacatggtctactggggcagacagtactgatttttctgctttgcgtagcgctatatcaaatcggcatacgtgttttacacggttttaactgtgtttttataagcagaatgttgtaagaatactttagggcacaccgtattttttgcggtgtgcctctttttttgctcttttttatgaaatgcacggctgatttttggacgcgcaggcaacaaagcaaaagtttttatgcaaatgatacaagcaaaatagaaaaagcttgtgcaaatccgcttttttcacaaaaagggctttacatttgctttggaatggtctaaaatacaagcagaaataaatcgttaggagtccgtatggacttcggcgtaaatttaggaggagaattccaatggcaaatgtaagagttggctttatcggctgcggcggtattgcaaacggcaagcacttcccgggcatggcccagcaggaaggcgtagatatgtgcgcattctgcgacctcattcttgagagagcagaaaaggccgctaaagagtacggcaccccggacgctaaggtttacaccgattatcatgagcttctggcagacccgacgatcgacgctgttcacgttctgaccccgaacgttgcacactgcgagatcaccgttgctgctcttgaggctggcaagcacgttctgtgcgagaagccgatggctgctaccccggctgacgctaagaagatgcttgaagcaagagacagaaccggcaagatgctgacgatcggctatcagtatcgtcacttcccggagaaccaggttgctaagaaggttgtcgattccggcgctcttggcgatgtttactatgcagaggctacatacctccgccgccgtggcgttccgacctggggcgtgttcacggataaggcaaagcagggcggcggtccgctgatcgacatcggtacgcatgctcttgacctcacgctgttcctcatgaacaactacgatgttgactatgtttgcggcacttccttcgagaagctcggccacacgctcgatgctaagcatcagggtcaggtcaactaccgcggtgagttcgatacctggaacaacgagacctacgacgttgaagactccgctgttggcttcatcaagatgaagaacggcgctacgattgttctgcgcgctgcttgggctatcaacatggctgaagactacgctgcaaacggcgaagcttacacgatgctggctggtaccgagggcggcctcgatacgaaggaaggccgtgtccgtctgaaccatgttgttgctgagtacccgaccatttcttgggttggcaacaaggtcagaggtttcatcccgggcttctctcagggtccggcaccgaagtccaaggaagctgagatctgggtcaaggctctgaagggcgaaggcgagctgtttgttacggctgatcaggcttatgtcgtcacgagaatcctcgatgcgatctatgagtccaacagaaccggcaagcctgtttacttcgactaattttaatcagtacattttgtgtgcggcggcatttcgtgtcgccgcacattttttaaggcggagtttccgcaaacgttataattttcagaaaggtggttttccccatggaaaatatcaatgttcaggtttattccctgatttccgagccgattagcccgattgagaagctgaagaccattgcaaagcttggttttgcaggcgcagagttcactgcagacttcacggaagtgccggttgaagaaatgaagaaggttctcgcagagaacaatttgaaggtcgattccgctcacgtcggtctggatcagattgaaggcgttctcccctacttcgcggagctgggcgcaaagctcgtcatctgcccggcgacaaatttctgcaacaaggcagaagctgaagaagttgcagcagatctcaaccgcctcggcaacattgcgaagcagtacggcatcaagatcggctaccacaaccacaccgacgagttctatgtggacgagggcaagtatctttatgactggctcatcgatgcatgtgacccggaagttacggctttccagcttgactgcggctggtgcagcgcagcaggcgtaaacccggtagacttcatcaacagccacgcaggccgcattgcaagcatccacattaaggaaaacagcggcgttatcggcgcaaacaagccgcagtcccgccacgacaccaccccgcgcttcaagtttgagaaagacgctgacggcaagccgatcttcccgccggagttcctcaagatgaaggaagagcacgacaagctgaacgtgccgcagggccagggcattgtggactggaaggctgttaaggcagctgccgacgcacagtgcgacaacgtcatttacgttgttgagcgtgaagccagctacaacgatccgcaggatcgcgtagcttgccttgctgaagacattgcatggctgaaggctaacctgtaatttaactgaacgcaaaatgagccgagcacagaagttgtgttcggcttttttgctgcgcaaaaaaagaagcttgcggggaacatagcgtagcgacactaaaaatttcgcccgccttttcaaaagcagaggggacttggggcagtgccccaagtcccctcaagttttctcgaagaaaatttaaatcaaagcctttattcgttcgctttcacaagcaaatgcgaagcgcttagtgctggatctgctgctcttcctcgtcatcgttatggctccacggcgagggggccaattttttatgcagcgcaacaagctcgtggtcgtagttatgtctgacttcacactttttgtcgaaaatcatggtcgcttcgtcgtctgcggtgcaagccggccactccggcaggtcttcgctggacggtttgccgtcacgcgcgaagttgagccacgcgtcgcacatctgcttttcgagcaagtcggtcacgccgggctcgttatacgcggcgacgaggctcgtgttatggaacacaaacgggatctcgctgcaatgccacgcgatatgcccaccgtcatacgggaaggtgtaggtcatcatatacgaatatgtgccgctttccgggtgctgtgcttttttcaagatgaaatcagtagacggcgcacggaagatggaatccatgaacagcacgtcgctgacgtccttatccgggtaaacctcggcgaacatctccttgagctttttgccctctgcgccgtagcgtttttcgatcatagaatcgatgagtgcagcatcggccttttcctcttcgcttaatgccggcatgaacgagaactcgccgagcacggtgccaaccatgaccgggatggtttttgcgtgctccgtgaaaccgacctcgagcggatcgccgaggtaccaatcgtttgcaagcgggttgccgccgacgtatgcgcccgtttttgcgacctccggcgcgaccttgttgtacgccgccgcgagctgtgcgtacgggatggtctccagtgctttgacatcatcgagcttcaattctgccagaagcgccgtgacgatggctttgccgttctgctccgtggaattgccggagacgaagtgatcgatgcagccgctctgcacgacgcccttatggaacaggccgtccgccgcaggggtctgcatcagcgtccagaccttcataccgccgccggactggccgaacagcgtgacgttttccgggtcgccgccgaagtttgcgatattttcgtgaatccactgcaaagctgcgaccatatcggcgttgccggcgttgccggaattcttatattcctcgccgaacggggaaaggtcgagatagccgaggatattgaggcggtggttgagtgaaatgacgacgacatcgccgtatttgctcatgttttcgccctcgtaggcgatgtgctcaatggaggagcccgccgcgaatccgccgccgtgcagccaaacgagcacgggctttttggcgttcgggtcaagatgctgcgtccagatattgaggtactggcagttctcatcgagcggccaatagcggtgcggcaccatcagctcgttgctgggctgatcctgctgcagcatggggcacacgtagccgtaagccagcgcgtttttgatgccctcccacggctctaccggggtcggctggtggaaacgctttgcatcggcgtattttacgccgtggaacacatatgtgccgtcaagctgaaaaccacgcagcttaccggctttggtctcgacgaccgggtctgttttggtgcacatgaaatttcttgccatatatcacaactccttaaaaatttgacaagtaaaaaataaccttgcaatgttaattgtaaggttatttcttataaatgtcaatattctaatttttgattttatgtgcaatttacaagaacaggtcttttaaaagctgcttgccggtctttgtgcggaagatgttctcgtacaccttttcggcggcttcatgggtcatgccgctctcgaaaatgtttacgaggaaatcggcttcaacgagaatttgataatcgatgccgttgatgttcgtgtacgtgtggtggtggccgatgaggtagcagatgcgctctgtctgctcatgggtatagccgcacgcgggcagcatttcgagtgcgatgggcgggccttccacctcctggtgagggccgttgcagttgccgtatttttcaaagcacacacggatgccgatgtcgtgcgtaatggcagcggcttccaaaatttcttttgtcgcatcgtccacgtcttcgccctccgcgatggtctttgcgaacgcgaacaccttcaaaaagtggttgacgcgctcgacacagccgccctcgtactctgtcattttcaaaacgagcttgctaaaatttgtcatgtttttcacttctttctttcaaaatcgtctgcgcagggcacccagtaccggcgcgtgaggatgccttcttccagcactttgttttcgagtacgccgccggcgctttcaatcgttttcgccgatccggtgtttgtatcattgcaggtgatgagtacctttttgatgccgattgaacgcgcaatgggcagcgcgagcgcaagctggattttggcatacccgtggcggcgctcactcggcacaatgccgtagccgatgtgaccgccgaacagcctgaggtagtcgttcagctcgtggcggatgtccacggcgccgaagagttttgtttcgttgtcatcggtgagaaaataaagcgtttcattcacaaagccctcggggacacgagtgcgcttttggatgctttcacgccgccattcctcaaacggcagatttttcggatttgcggacgcgatgggtacgatgcgctccgcgccccagtctttaagatatgccgcatactgcgtcgctgtaatttgttccggcaaaatcagtttcattgaaatttctcccgttatcttgccatgacggcctcgatgtcttcgatggtgcgcggcacggacgcagagaggttctctgcgccggtcggcgtgacaaggcagttatcctccacgcggaagccgatgccgagatcttcggcgtaaatgccgatatcaacgcagaagaccatattcggcgcgatgggcttgccgagtgcatcgacaacatcgtgcacgtcgtagccgacatggtgcgcaccgccgtgccacatgtatttgccaatctcatcgtaagaggacagcagaccaatctttttcagctgctcacagcaatagcggcgggcggtcttatccacatcgtccatgagcataccgggcttgatggtggagaacatgtagttcgacgtattgagggcacactcatacagcatgcgctgctctttcgagtatttgccgttgcacggccagccacgggagacatcgttgcactcgccatcccactgcgcgccaacgtcattcaagatcatatcgccgtccttggcttgtcccatgtagctgtcgtaatggatgcagaagttgttttcgccggcggaaatgatggagtggaacgcgggctcaagcacgccggcgctggtgagggcgtagtcgaactcggctttatactcgtactcatacatgccggggtgcgaagcgcgcatcatgcgcagaatgccttcgcgcgtaacggtcatggcgcgacgcatggcgtcaatctcgcacggagccttcagggtacgcaggcgctttaagataggcaggatattttcaaccgtgaggaacgggtagccggtcttaatggtctgcgcgaagcggtgggcttcatctaagccctcgtccggcgtatggcggtagaggtcgaggtagacgtgctgcacgttgccgctgttcaaaacacggtggatatcgttttcaaagttctcaacgaagcggatatccgtgattccggactgcgccataacttcatcggctttcggtctgcggcccgtccagcgctctttcatgagatccggcgggaggatatagatggattcctgcacattgccgccgatttttgtggcgaccaacacaaaccccgcgaatttaatgcccgttaaatacaggaaattgcggtttgtgaagaatgtatagtacgcatcggcgctctgacgcggtgcgctgccggaaaagaacacggctgcgctgccgtctttcatttcggcgtacaggcgctgacggtttgccttgtggaattctgctgtcatgataatccccccgaatctttttagtgcttatttatattttctaacgactcatttctacgagtcgttcagaaaccccattgactgggtttcctgcggctaaacagtccaccggactgtttagcctaccttcctagtcctaatgtaggcaaaaggatttcgtcgtctgcggacgacgaatcagggctctaccctgataacccgcaagttttctggaaaaaacttgaccaaagactttgtttgtcgcttcgctatgtttactttagctttgctgcaagtgcaacccagcctttttcctctttgcggtcgatgatctcgaatttatccgcgaggcacgccaaaacatcgtcttctctggtatcaatgatgccgctcatgatatagacggtatcgagcttcataaagcgtggagcatcttttgtgagcagaatcacgacgtctgcgacgatattcgcgacaacgacatcgaatgtgccggtaaccttatctgccagattgccgcagatgccggtgaacttatcgccgacgtggttgatctctgcgtttgcgacggcggtcttgacggcgagagcatcaatatcgacgccaacggcgctgcctgcgccgagcagcagaccggcgacggacaaaataccgctgccgcagcccatatcaagcatggtatcgcccggctttacatacttttcgagcagctccatgcaaaggcgggtcgtttcatgcgtgccggtaccgaacgcgagacccggctccagatgcagcacgacgcggtcacctgcttcgtactcgtcctcccacatggggcgcacaagcaagcggttgccgacggggatgggcttaaaatactttttccagttgttgatccaatcctcctccgcacagttggcggcggtgatggtgttctcaatgccgacggcttcaaaacgctctttgaggaaagaaatggcttccgccgggttttcctccgggctgatatacacatggatgatgcttttggttcggtcttttttaagaaggtcttcgtcaatgaggtcgatatgcgcgatttccatcgcttcctcttctaaatgcgaatagtcttcaatataaatgccgtagggcacgaccatctgcgcaatgtcgcccgcgcggtccgtatccgccgcgggaatagtgacctgtaattcggtccagtctgcgtttacctgatctgtcatactttttaactcctgttctctttttataaaatgcagaaaattatctatacatttctcatataagctgattatacaacgcgcccggaaaacttgcaataggaggccctgcgacaatcatgacaaaacgcaaatttctgctgcaaggcatcgctttaacggcattttcactgtttttccgcattacgaatatcggctaccgtgcgtatttatcgggcaaaatcggtgcggagggcatggggctttaccagctcatcttctccgtgttcctgctcgccatcacgctttccacttccggcatcagcttggccgtgacgcgcatggtgacggcagccattgcggcgaaccaccgctgcacggtgcgcagcgtggtgacgcagtgctttttgttctgcctgacggtgagctgtaccattgcggttttgctgctgtgcttttcggattttgccgccgcgcatattttgggcaacgccggcgcggcgccgtctctgcgcattttggcgctggggctgccgtttatgtcgcagtgcacgtgcatgaagggatattttttagcagtggacgaatcgctttccacctcatggagtgatgcggtggaacaggtgctgacgattttctccgccgttatgctgttctggtattttgcgccgcagagcatagaagccgcgtgctttgcggcgatgattgcttcaacattcggagaagccgtttcgtttttggcggggttcctcatttaccgccgcagcttaaagcgcaacacgccgaaagaaaaagagcaggcgacgggcgttctgcacgggatgttccacattgcggtgccgtgcacgctttcgagcgcggcgcgcagcttgctttcaacggcggaaaatctgctcatcccgcgcgagctcgggcgttacgggctcagtcgtgcggcttccatgtccgcctacggtttattgcagggcatggcaatgccgatgctgtactttccgtcttcgtttttgacgtcgttcgcgtctttgctcatcccgaaaacggcacgggaatttgagctttcgcaccgcagggccgtgcggcacatcacgcagcgcgcggtgcacgcagccctgcagttcggcattttctgcgcggggatcttcttcgttttcggcagtgactggggcgaggcgttttataagagccgggaagccggggcatacctcaaaattttggcgccgctcgtaccgcttttatatctggatgtcgtggtggacagtcttttaaaggggcttgacgagcagctgaactccatgaaatacaacttttcggattcgtttctgcgtgtgcttttgattttgctttttatgcggtttgccggtatgcaggcgtacattgcaattttgtttttctcgtccatcttcaacgcgatgctgagtgtacgaagattattaaaagtcgccgatgtgcatatcgggctattgaaaagtgcagtgatgccggcgttttttgcactgcttgccgcgaatgcaacacagtttttattgaaaagcattttgctttcgggtattccccttgttttgctgcaaacggcggtttgtgcagggttttatgccgctttgctgttcccgtttttaaagctgtgcgcgtatcatacggacaaaaagcaaaccgttaaaacataaaagcggcgctccgacaggttgccctgccgaagcgccgtggttttatttacgtgttgtcagaaaggaatcagatccaacgggtctcggtcatcttcggctcgaagatgatagcggacttcagggtctcaacagccttcataaggccctcgttctggctcatgaggctatcctcatgttcaatgctgatggcatagtcatagccgacaaggcgcagagcgctgatgatgtccttccaatagagcagatcgttgccgtagccgacgctgcggaagatccaggagcggtgtgcttcgtctgcatagctcttcgtgtcgagcgcgccgttctttgccatgttgtacttatcgagacgggtatcctttgcgtgtacgtggaagattgcgtcgccgccgagctcgcggataacagcaaccggatccatgccctgccaaatgaggtgggacgggtcaaagtttgcgccgatctccgggcccacagcctcacggagcttgaggagcgtctcggtgttgtaaacacagaagccctggtgcatttcaagagcgatcttgttgacgccgtgctctcttgcgaatgctacaaaatccttccagtaatcgacaagaatcttccactgatactcaagaatcttaccgaaatcgtccggccatgcgcatacaacccagttcggatactgagaggtctcgcaatcgcccgggcagccggagaagcagttgatctgatgcaggccgtatttttcagccatcagaactgcgttgcgcatgtccttatcataagccgcagccagctccttattcgggtggatcgggttgccgtggcaggagaatgcgctgacttccatatcatacttcttgatggtatcgcagaactcctgatactttgcttcatcgtggagcaaaacttccggatcgcagtgatctttgcccggatagccgccgcagccgatttcgaccatctggatgcccatggacttgaaatacttcagtgcgtcctcaagaggcatgttgcctacaacattggtaagtacgcctaacttcatgttaaaacactccttctaattgaataaatcaaaagaataacagattgaattggggctttttctgaaagagaaaaccctgtttgattctattgtactatatttccttggtaaaatcaacatggatttggcttttacgccgcattttttttggaatgtctttcggcagatgtatgaaatttttgtggttttccgtcaaattcacggtagaatttcgccgggccttccgctataatgaaagttagcattttattaaaggcggtataattaaatggagaagacccaaaactttaaaagcaccgtgtttgcctgctaccgcgggtatatcacgcagggcattgtgaacaatctctctcccctgtttttcgtgctgttccaaaacaaattcggcatttcgtattcgctgatttcggcacttattctgtgcaactttgtgacgcaggtcatcacggatgtgctttccgttaaatacgtagaccgcatcggctaccgaaaatcggcggtcatcgcacacgcgctggcgtttttaggtcttgtgatgcagggcacgctgccgaatgtgctgcctgcgccgtatgtgggtcttgtccttgcgacgattgtgaacggcgtgggcggcggcctgattgaagttatcatcagcccgattgtcgattcctgcccgggagacgcgaaggcctccgcgatgagccttttacattcgttttactgctggggacaggtaggtgtggtgctcatcacgacgcttttgctgcgcttgatcggcgaggatctgtggtttatcatcccgattttgtggtctttgctgccgctttataatttattccgtttcctcaaggtgccgctgatgcccaccgtgccggaggaagagaaaacaccgctcaaaacgctgtttacctcgaaaattttcctcgtggcactgcttttgatgctttgcgcgggcgcgagcgagcttgccatgagccagtggagctcgctgtttgcggagcgtgcgctcggcgtgacgaaggtcatcggcgaccttttagggccgtgcctgtttgcggtgtttatgggcatcggcagaacaatctatggcgtgtggggcgagaaaatccatttaacgggcgcgatggtattctgcgccgcactgtgtattttgtgctatctcggtacggctttatttgaaaacccgtggctttctctgctttcatgcgcgctgtgcggcttttccgtgagcctcatgtggccgggcacgttttcgctgacttccgctgcatacccgaagggcggcacggcgatgttcggcattttggcggtgttgggcgatgtgggctgctctgtgggcccggcattgatgggcgcagtgagcggcgcggtttccggcaatgcaaaaatcgccgcatctttcccgaatctcactgcggaccaactcggtttaaagagcggtatgctgttttcctcggtttttccggcatttattttaatcggcgttctgttgctcacacggtttcataaggctgcgaataaaaagccaagccccaaagcggacttgagcgaagaatagttttcaggcaacagatagagaaaaagtgcaatgcaaatctcttgcatttgaatttgcaagggataaattgttgcacttttgccagattgctaccaaacagaatttgtgaatgcaaacctcaaagcagtttgcttcctgcaggctttctatcctgcggcctgtgtcagcacacatgccgttgtgctttgcgacatgaacggcagacaaatgccgctctcacctgcgccgattagcagctccgtgccgttttcgcaggaggcttatacgtcagatactcaccgtaacagttgggtttccagctcgcgaacgcggcgaagaatatcgacggaataggacggaatacggccgagcgcatcgggaccgacgttcaaaaggtagtttacacccatgccgttgagcttctgcttgtttgcaaggatctgctcgggtgttttccagttgtggtcgtagtatttgaagccccatgtgtcgttcagcgtggccgcggtctcatagaggttatacggcgaatacttgaagccgaacagatcgttcatggactgcatgtcccctgcgcgttctttcgagatctctgccggacgctctgcgggaatctcgttatcgccgagagaaacgtaatcatacacgccgttgccgaggcgagagttcacaaggcagtccggctgatactgcttcacaaggtcgtaaagctcctgactctgcgcctttgtcatcacgcccggggtatcgaaccagatcaggcagatgtcgccgtattttgtcatgatctccttcacctgcggcttgatcttctcgttaaagcagatggagtagtctttgttgtctgcaccggggaaatcccagttgttataccacgccgtgcctgcgcagccggtggttttgtcgtagccgccgccgtgcgggtggtgccagtcaagctcctgcgaatagtaaagccccagctttaaaccgtgcttgtagcaggcttccgccagctctgcgatgaggtctcttccaaatggcgttgcttttttgatgttgtatgcatcgcagtcggaatcaaacagcgcaaagccctcgtggtgcttagaggtaaccacaaagtaggtcatgccgcattcttttgcaagctttacccactcctccgcattaaaataaacagggttgaacgcacccgcaagctgttccatttcgcggttcgggatggcaaaggcggactggatccattcaccgtaatcataaggcgtgcggcgccctctgtactcaccggcgagcatggaatagagtccgaagtggaccatcatgccgtatttcgcttcgcgaaaccattcgatattgttcatgtcttttctgcacggctgccgacgaaaaaaattgcgcagccgtgcttcctcctttgagaattttttatgtaccctattatagcatacggaaccgaatctgtcttgctgtttcttttttatacaagcgaaaaaagccatgcagcgtgctatactgaaaatgaagacaaatcaaagcggaaaaaccggagacatagtatggcggaatatgtagatattgtagatgagaacgggatccccacaagcgaaacggtagagcacgaaacggcgcacgcaaagggctttcggcaccgcacccgcgcttgacgcaaaagcacttgcgagcctgcttgccagcaatcccgaactactcaaaaaggctttggagtctgtcctgcttgcaataacacctgagtttattagcgaagcgcaaattagcaaacggactgaaaaccgaatgaaaatacgtcgataatgcagtgcgtattagcaaaatgctaactgtggaaatacagaaaaagtgattggtcttgaccacaaaatgccaaacctgtgattagcaattagcaagcagccaaccacaacagaaaataaaagccgaaaagcccgattttactaggcttttccgaaattatagtgttaatcatttctttttttgaaatctgctaatattatgccgtttttccattcgttttagcaaggtattagcaaacgcaaagatttttggggaacatcattaagttaataggatactcgttacgagtgctaattcacagttgaattttttgttctttttatattagtataaataaaatttaacttaaataagtcatagagatatctgtattcagttttcaaaatacacaaaatacaaatgaaaggcttccattttcgtggttcggaattaactccttcacttgtttgaaccgggagggcgtttttgggggtgttttttcaaaatttcttgaaaaaattttttgtaaacaaaaagccgcctatttccctcgtaatcgaggtcaatagacggcgggtagaaatattcataattttggtgtataataggaaattaagagaaagataaatttgaatttgtggaggataatatgaaagtagatgtcattaagaaatattttcagtcttggttagataacgatgttgagattgtaaaacagactttttctgaaaatgctttgtatagtgaatgctatggacctgaatatcatggcttatcacaaattgtaacatggtttgaaaattggaataataagggacaagtattggaatggacaatcaaacgaatatttgagcaaaaccaaacgttaattgttgaatggtacttcagatgtaattatgatggtaagatagatggctttgatggtgttacaatagcagattttgataaggatatgaaaatattaaaattatgtgaatttcagtcgaaggcagaacactactatccatatgaatcatgatctaaattccagtttgtcgaacttactctaaattagcaaagaccgcttacaaaagtgtaggcggtcttttttcgtgtttagatatatttgattttgagctttcttttcttggctgaaagcaccttgcaaagaatatcatctactgcgtccgtgtatctgccttgtgctatcaggctgttcttcaaacggataagtgattgcaacactctcctgtattcttcatcggagcagagagggtattttcattagcaaaattgcgaaaaccctgccgatttttattagcaagcagtccacctgaaaggcggacgacattagtcccaatttccattagctgacggaggatttgctaatgaggttttctgcatttttcagtttcattgtctttgaactaaaataaaaaaagccgaaaagcccgattttactaggcttttcggctgtgcttttggcaccccctgcgagaatcgaactcacaactaacccttaggagtatggcttaccatgtgatacacggttcggatgtaacttccaatatcatcccttacgcagaatgacttgtagtaaacgaactttatgatgcaaaacacctattctgacgcagttttatgtgtccgttgggtggtcctattagcaaattcttagcaagaggacacccagccaaagccgattgctactgccattcttcactcccttagtcaaaatgacaaggcaaatacatggagattactatggacaagaaagagaaaaagtcactgccggaaccgcgcacatataccgtggaacagattgcggctatgctcaacattggccgcacaaccgcatatcagctcgtcaagcaggaggagttcaggatcgtccgcataggaaatgcgatccgcgtctccaagaaatcttttgacgagtggctggaaagtttggaattgtgaatatcgcaagaaacgccgtaggctcaaaaaacctatggcgtttttttatacccattttgaaggaggctggcaatgaaattgacagaagcagaaatgaggatggtgtttcagattgaaagtaccaatcagaacgctgccctgaatgagatttacatgacatggcgctacgcgccgaacccggcaacgaaagaaacggcggaaggccttctggacaagctccgtcccctgtcggatcaggagtgcatggatttgatccgcaaggtgcaggccgaataccgtctgccggagaaagcccgcaccatcggggaaatgctggcagaggccagacagcaatccggggcgcagaagttatctggtcatgacattatggctttggagcgtttcgacccggcaaccagacacatgatcgtctttgatgttcttacccatgactcgcctgttggctggaagggtgagaaaatgcgcctgttcctgactgacgccggatacagtaaggctttggaaaatcaggaaaaggggcatatcaaaatccgcaaccatgcgaaggtgctttccggcgatctccactatgaccataaagaccgtgagaggtagccgccctaaaaatgtatcaaaatcagtgggatatcttctgtttcttcctctgtagcttgcgttctgaacagggcgtggatgttttcccatgtgggaggctatggaggcgtacagacggataaaccgcttaaaatcaacactttttattttcacaggaaggaggtgtgaagatggctgtttttcgtattgaaaagacccgtgattatacggtcatgtcgaaccatcacttgaaagatcgaacgctgaccctgaaatccaaagggctgctgtccatgatgttgtcgctccctgacgagtggaattacaccaccagaggtcttgcggcgatctgtcgggaaggtgtggacagcatcggtgcggcgttgaaggagttggaaacccacgggtatatccggcgcacccagcttcgggatgaaaaaggcaagatcacggataccgagtatgtcatttacgaaatgcctcagtgcgagccgccgtcaagcccaggtacgcctttaccgggtacggcaaagccatatacggaaaacccggatatgggtatcccggatacggcggaaccgtgtacggaaaaccccgcacaattaaatactaatcaaacaaagactgatttatcaagtacggagatatcaaatcctatcccatcaaatccccctacccccacaggggcaaggatgggaacggatcagatgggagccagagaatgttatcgtgaagtgattttggataacatcgagtacagctatctggtgcaggacaatcatatcgactgtgagcagcttgacgagattgttgacctgatcgtggataccgtgtgttctgcccgcaaagtcatccgcatcgccggagacgattatccggcggaggtggtaaagtcccggtttatgaagctggacagttcccatgttcagtatgtcatggactgcatgaaggacaacaccacctatgtccgcaatatcaagaaataccttctggcggcgctgtataacgccccgaccaccatcaacagctactattcttccttggtacagcacgatatgtacggggacgggcaaagggggcgaggctaaatgcaggaggaagtaacgcggggcgccgtaacgctcattgttgacggagccaagctaagtgagcaggtctttgaaaaggccgtcaaaaagttcctggaggaaatccagaaaagccagaagcccaaaatctaccgcggcaggcagagccttaaacagcttgccagccagaacgcaggtcttgccaatatcgagatcagcgacaagaatatcaaggctttctcccgtgtggcgaagaaataccatgtggattttgccttgaagaaagacacctccgcagagcagccccgttacctggtctttttcaaaagccgggacgcggatgccatcacagcggcgtttcaggagtttgccagccggaaaatgagccgtgaggaaaagccctccatccgggagcggctgacccaggcgaaggaacaggcggcagagaaaacgaaacaccgtaccattgaccgggagaaagtaaaggtcaaagatcggagcgtgcagagatgaatatgaaaaaaatgtttttgctgaaccttccgtatcttctgttcgtgtatcccttcgataagctggcacaggctttccggcttgcgcccggcgctgacctctccggcaagctgctttctatcgggggcggcttcacggcagcactttcctccccgtggctcagtttccatcccacggacctgctgatcggcatagccggtgcggttgtccttcgtatggcggtctacctgaaaggcaagaacgctaagaagtatcgccacgggatcgagtatggttctgcccgctggggtacggcggcggatatcgccccctacatggacaaggactttttccaaaacatccccatgacgcagacggaacggatcacgatggcgagccgtccaaagcagccgaagtatgccagaaataaaaacattctggtgatcggcggttccggcagtggcaagacgcggttcttctgtaagccgtcgctgctgcaagcccattcgtcctatgtctgcaccgatccgaaaggaaccttgctgccggagatcggcactttcctggaacggaagaaataccgtatcaaatgcctcaacctgataaacttccgaaaatccatgagatacaacccactggcctacattcgatcagagaaggatatcttaaagctggtgaacgccctgattatgaacacgaagggcgaaggcgaaaagtcttcggaagatttctgggtcaaagcggagcgcctctattattccgcgctgatcggctacatctggtacgaggccacggaggaagaaaagaacttcatcacgcttctggaccttatcaatgccagtgaagccagagaggatgacgaaacctatcaaagcccggtggacctgctcttttctcagttggaagaacgggagccggaccacttcgccgtgaagcagtaccgcaaattcaaaatggcggcgggtgttgtatgctctaaaagacttcttaatcaagcggttgggaagtctcttagaacacacaacctaaaaccgaagaaaggagcgcaagttatgagaaaaaacgagaaaatcacagctctgtacgaacgattgagccgtgatgactttggcaaagatgatgaccaacagcgtgagagcaattccatttccaatcaaaaagctatgttggaggagttcgccgcacggcagggctttacaaacattgtccatttcacggacgatggtatcagcggcacttgttttgaccgccccggatttttagccatgatgaaagaggttgaagccgggaatgtggaatacctctgtatcaaggacatgagccgcatgggtcgtgactatctgaaagtcggtcagattatggaaatcctgcgtcagcgtggcgttcgccttatcgccatcaatgacggcgtggacagtgccagaggtgatgatgattttacccctttccgcaacattatgaacgagtattacgccagagataccagccgtaaaatccgttccactttccagtccaaaggcaagtccggcaagcacctcacaggcacggtcatttacggctatctttggaacgaagcaagagaccaatggttggttgaccccgaagccgccgaggtggtcaagcgcatctttgccatgacgattgacggctacggtccgtatcagatcgccagcaggctgaaagaagaaaaagtcctcattccgtccgcttaccttgcccagcacggcgagggcgtgaacaaaaacaagactttcaaagatgtgtacggctggggttcttccaccatctgcaacattcttgaaaagcgtgaatatctgggacacaccatcaatttcaagacccgcaagcacttcaaggacaagaaaagccattatgtcccggaggacgaatggacaattttcgagaatacccatgagcctatcattgaccagcagacctttgaccttgtgcagaaaatccgtgggaatgtcagacgctacccggacggctggggcgaagcagctcccctcacaggcttgctttattgtgccgattgcggcggcaagatgtatgtccaccgtaccaacaacggcaagcgtatttctcaatatacctgttcccaatacagcaaagtcccagttggaaagctctgcacgacacagcaccgtatcaatgaagatgtggtactgtcccttgtttccgaaatgctcaaagctattgccgagtatgccaagcatgaccgagccgagtttgtccgtgtggtgcaggaagcgcagtccagccagcagacagcagaggttaagaaacagcggatacgccttgccaccgcaaagcaaagagtttccgagctggaagtcctgctctgcaaaatctatgaggacaacattttaggaaagctgtctgacagcagatatgccactctggacgctcaatatgaaaaggagcagaccgagcttaccgctgaaatctctgttctggaaaaggctatcaagagctacgagaagcacgaaaaggacgctgaccgttttatcgctctgattgacaagtatgagaacttcgacaagctgacgattgccatgctcaatgagtttattgagaaaatccttgtgcatgagcgtgaccgcaagggcagtattcagaccacacaggaggtcgagatttacttcaatttcgtgggtcgtttcgttccccctgcgtttggagaagtggagctgaccccggaagaattagaggaaatccgcaagcgtgaggaacgcaaggacaggcttcatcagaactacttgaagcggaaagccagcggagcgcagaagcgatacgaggacaaaatcaaggggagaaaaaaggcagaaatcgaagccaagaaagccgccattcgtgcggaggatattgcaaagggcgtgttcgttcccgtcagcagtttaccgcagagagagccgatgaaaggagtacaaacagcatgaatatcacttacacacggaacggcgattatcttatcccgaacatcattatccgcaagaccaagcccatcggacactacggcagacttcgcaaggcgtatctagaaatgcaccgcccgatactgttcaatgaactggtgctatccgacaagctctttgaacattgcgccgagattgaagaagcggcacgaaaccgcatggagctgatcgtgcggtcactggcagagcaaaacggcgtgaccgagcaactgaaagctgaaaaccaaatggaatgggtgcggcagatgaacgcttgcaaggcgcaggcagaggaagttgtgaaagcagagttgatttataattgagcgaggaagtccgggcagaaaactgttcggacttttctcatatagtccaaagttgcggtagaattgttcacaagttttatggtataatttgaatacgaaattgagcaacaaatcggaagttcaatgtgaggaaaattagatgaagaaaaagtcttattggttaagtattagtgtgttcgtattgatactgatatggacggtttattattatgcaatgcagtacacaggaggatttgcagacttaaaggactctattgtttgtgggattgcaggtttgatatgtatcgtatttatcgtgaaaagaactattgactttttgaaaaacaaaaaatcgtaaaatttcagtttgtcgcactgataaaacccctttaggaactaaagggcgcacttctatactctctgtcgagagtagtgcgtcctgcggagcttcattctccgtcagcagaagaaaactgcatgaccgagaatgttgcgtcacttcgttccgtcaaggtggctacacccccttgcgccgctaaagcggctatcccctgtggacttgccgtccgcaaacggttttgacaaaccgttcgccgccagcaagtttgaaaatcaagaatcttaatttgataaaggagtgtgattctatgaaaaagaaattacccataatcctcttgggtgttattttggcttgtgtgttggttttcggtttcctttatgcaaacaatgacattggtaaaaccgcaaacagtttagaagcagacattcgccaatctcaaaaaattttggatgattggattgttgatggaagcatttccgacacaatggctgcatttatttcttacccacaggacaagacagaccacactttttctgtctatgtaaatcgccctggcttgtcttttggatatttcttccgtggtggtggagatatagttgaggttgatgattacattgcagagtttgttgttgagggaaataacgaaagggcatttatctcaatgaatacccaaaatattgttcgacttgaagtagatgatggcaacggcattcaggtgattgatattgatagtggcaagcctttcgccattgtcctgcccctcaatgtaggaaacatctgtttctatgatacgaatggaaatgttgtggaatatcttcgccaacaactttgaccaacttcaatttaccgaactgaacacaacaactgaataccgaaaaactgaccgttgactggtcgcaatctgcgaaaagttgacggtctttttttatcccaaaaatcaaaaaaggaggtcaatcacaatgacaaaaccgaaaacccttgaacagctccgagccgaaaaggaacgagccgagacgcagcttgcacaggagaagcacaagctcaaccgtcttgagaacagaaagaaatatctggagaaaggcgaaaggcagaaacgcacccatcgtctttgcaatctgggcggcacgattgagagccttgccccggaggtcaaagatctcacacgcaccgaaatgacagagctgatggagtacatcttttctctgtccgaagtccagcgagccgtccgtcacatggcgattactcacaccaaccaagcgaacagagaaaaggagttgaaagccgatggcactatttcatctgagcgtcacgcagactaagcgaagcgcaggacagtccgctattgcttctgccgcctaccgtgccggggagcgattgtatagcgagtattacggcgaatacagcgactacacccgcaagggcggcgtgatctgctctgacattctcttgccgtcccatgcaccgccagaatacgcagaccgccagaccctatggaacgccgtggaaaaagccgagcgtggaaagaacgcccagcttgcatacagctttgacattgccttgcagaatgaattttcccttgaggaaaacatcgctcttgcaaggcgatttttattggagaactttgtgagccgtggcatggtggttgacttcgccgtacaccagccagaccgggaggacggcggcataccaaacccacacttccatgtgctttgtcccatccgccccatcgagcaggacggtaaatgggggctaaagcaacgacgagtgtacgagctggacgaggacggcaaccgcatccgagaccagaacggcgagtatgttttcaatgccgttcccactaccgactggggcagtcccgaaacgctggaacattggcggcagacatgggcggaactatgcaacgccaagtttgcggagaaaggtcttactgtccgtatcgaccaccgaagctatgaacggcagggcgtggagcttcttcccaccgtccatgagggcgcaaccgtccgggcaatggagaagaaaggcatacgcaccgagaaaggcgagttcaaccgctggatcagagcaaccaatgccgttatccgggacatcaagaagaaaatcgctctcctgtttgattggattgccgaagcaaaagcggagcttgccaagccgcaggcacccaaccttgtttctctgctgaacgcctactacacccagcgcaaagccggggcttattcccagaaaggcaaaatcagcaacctaaaggagatgaacgagactttcaattatctccgggcaaacggcatttacaaccttgaagatttggaaagccgtgtcaatgaacacagctccaccacagagagcttgaagaaaacgctggacgggcagaccgcacgaatgaaagaaatcaagcagctctatgacagctccgctgctttccagaacttgaagcctgtctatgacggcttgcagaaaatcaagtttgagaagcccagagccaagtacaaggcagagcatgaagcggaactgatacagttctacgccgccagacgaaagctgaccggggagttcccagacggcaaggtggatatgaaaaagctgtccgacgagtatgacgagctggaacaggcgcacgaaaccacctatggcgagtttaaggctgtcagagacgatttacaccgcctttggaaggtcaagtcatgtgtagatactgccgcccgatttaacgagcgcacagaggaacaaaagctccaaaatcgaccccaaacacgacagaaaaaggaggaactatcccgatgaattacacccaagcacagattgaccgggcaaacgccgtcagtctggaagattttctccgcacacagggagagacacttatcaaaagcggacgggaataccgttggaaagaacatgacagcctgaccgtccggggaaacaagtggtttcgccacagccagagcaagggcggctatcccattgatttcgtcatggagttttacggcaagtcctttcccgaagctgttcagatgttgacaggcgaaagcggcgagggacagaccgaagccaccacagcaccgcccacagcgttccacttgcccttgcacaaccgaacagccgatagagcaattcaatatctttgcgaaagccgaggtctcaacaaaacgcttgttgaggcttttcttctttccggggatatttacgaggacgcaaagcggcacaatgttgtgtttgtcggcagagaccgaagcggtacgccgagatacgcccatgtgcgaggaacggcagacccattcagacaggacattgccgggtctgacaagtcctatccgttccgctatgagggaaacggcaatcagctctttgtctttgaagcaccgatagaccttttgtcctttatctgcctttacccgcaggactggaaaaatcgaagctatcttgccctgggcggcgtttcgggcaaagcccttgaccgtttcctttctgaacgcaaggacacccgaaaagtgttcctctgccttgacagcgacaccgcaggaagcgatgcctgtacccgactggcacagtccattcccggcgagatcgccgtcattcgccttgtcccggcaaggaaagactggaacgatgttctccgtcagcaaggggacattcccagccgcaaattcatagccgagacaatcacgctgcgagagctgcccaccgcccagcctgttcccatgctccgcatggcagatgtggagctgacgagcgtggattggctatggtttccgtatatcccctttggaaagctgacgatcatacagggcaaccccggcgagggcaagacctactttgccatgcgccttgcggcggcttgcaccaatcgaaagcctttacccggtatggagacccttgagcctttcaacatcatctaccagaccgcagaggacggtctgggcgataccgtcaagccccgactgatggaagcggaagcagaccttgaaagagtgcttgtcattgacgatagggacacaccgctgacccttgccgatgagcgcatagcaagggcaatcagggaaaacaacgcaaggctggttatcattgacccggtgcaggcgtttctgggcgcagatgtggacatgaaccgggcaaatgaagtccgtcccattttccgcagtctgggagatattgcacaggctactgggtgcgctatcgtgctgatagggcacctgaacaaagccgcaggaacacaaagcacttacaggggcttagggtctatcgacattacggcggcagtccgcagtctgctctttatcggcaagctgaaggacagccccacaacgagggtgcttatccatgagaaaagctcccttgcgccgcccggacagtcccttgccttttctctgggagacgagaaaggctttgaatggataggagcttatgacattaccgctgacgagcttcttgccggaacagacaccgccaagaccgagagcaagaccgcacaggcgcaaatgcttattctggaactgcttgcggacggaaagcgtatgccgagtgcagagttggaaaaggcagtcaatgagcgtgggatttcctcacgcaccatgagaacggcaaagagccgtatcggggacagacttgtgaccgagaaagacggcacagcatgggtctgctatctccgagactgacaacaggaacacggcaagcgtggcaaagacggcaaggtttttatagataccttaatgttgccgccttgccttcttccctcataccgatcaccgcccgatgatgaaaagtcaccgggcattttttatttacaggaggattttgaatgaacaataccgcaaccaacagtaccccttgcccgactgtcagaaagcagattggcaagaccacctatatcgtccgtgtccatttcagcgagaccgccaaggagacgatggaggacaaaatcaagcgtatgctccgtgaagaagtccgcaaaatgtgacttctttttgaatttgatgaaaaagtccttgacttttcgtctctggcaaaaccttaaaatccatcctcatttcctgcggtgcccggcttgctccctttgatatcaaggagctgcgggacctgatggagtatgacgaactggaactggataccctgggcgaccaaaagacggcgctgtttgtgatcctgtcagatacggacagcactttcaatttcgtggccgccctcatgtatagtcagcttttcaatctgctctgcgacaaggcggatgacttctacggcgggcggctgcctgtccatgtccgtttgatcctggacgagtttgccaacatcggccagataccgaacttcgataagctgattgccaccatccgaagccgtgagatatcggcttctattattttgcagtcgcagagccagttaaagaccatctacaaggatgcggcagataccattgtcggtaactgtgacagcactttgtttttgggaggcaaggaaaaatccacgctcaaggaaatttcggaactgctggggaaagagaccattgatctctataaccagtccgaaaaccggggcagccaggtttcccacggcctcagttatcagaaattaggaaaggagttgatgacccaggacgaattggcagtgatggacggcggcaagtgtatcttcatgctgcggggcgtgcgtccgttcctttcggacaagtacgacctcacccggcacccgaattacagatacacggccgacgccgaccctaaaaatgtctttgacatggaacggtacatgaagaagcagcgtgccgtggtaaaacccacggacaccttcgatgtgtacgagattgacgcaacaacttaacccaaaatcaaaaacattttttaggaggattattttatggaatttttcaacagtgcagttggtgttttgcagactctcgtagtggccctgggcgcaggtcttggtatctggggcgttatcaaccttctggaaggttacggccaggacaaccctgcttccaatgctcatgtgccataaagtaacacacaagaagttgatagacaacagcccgttattccgtaaaaatttcaaagtagaatttcatggaagccatacaaattgtgtggcttcttttgcttaataagcaaagataaattttctaataccctattgacaaaagcgtttgccttgaatataatgtacttgtacgataagtacattatagaacaaaggaggggcgttgtggaaattatcataagcagtaatacgagcaagccaatttatgagcagataacttcacagataaaagccatgattatgagtggcgagttaaaaaccggcgatcctattccctctatgcgggcgctggcaaagtccattcatgtgagtgttattaccgttcaaaaagcgtatgaagatttgcaaagggacggttttattgaaacaacggtaggccgaggaagttttgtgtcggcacagaacaaagacttttatcaggaagaacagcagagattggccgaagaacatttgcaagaggccgccgatattgggcggataagtggaatatcgttggaaaaactgattgaattactgacgatattttatcaagaggaggattaactatgaacgctattttgcaggttgagaacttgacaaagcaatacgccgatttcaagttagaccatgtttcgttttcggttccgaaaggaacaatcatggggcttattggcgaaaatggagccggaaaaagcacaactatcaatgctattcttgatttaattcataaagatgatggaacagttactttttgggggcaggaattatcgtccacaaaacaaatcaaagaggatgttggcgtagtgtttgacggaattaacttctatgaaacgctcactccggccaaagtcgggaaaattgctggtgctgcctacaaacagtgggacggccatctgtttcaagactatctaaagcggtttcaacttccagcggataaggaaattaaatctctgtccaagggaatgaagatgaagttgtgtattgccgtcgccctttcccataaccccaagctactgattttggacgaagcgacaagcggcctcgaccctgtaatgcgtgatgatattcttgatgtatttcttgaatttgttcaggacgaaaatcattccattttgatgtcctcgcatatcacaacagatttagaaaaagtcgcagattacattacatttatccatcagggcaaggttcttttttgtaaaacgaaagatgaacttcgttataactatggtattatccgctgtggcgcagcactgttcgaccagctcgataaagcggaaattctggcttaccgcaaagatgattatcaatggaatgtgctggtagctgacaaggaaaaagcccggaggaaatataaaaatgccgtagtggacgacgcaacaatcgacgatattctgctgctgtatgtgaaaggagagcaagcaaaatgaaaagtcttgttttgaaagatttatttaatatcggccacaatgcgaaatctatgctattcatccttgtggtttttgccgttgcgcttattccgttttccggcgtagaaggctatatttttgtatgtgcgattttgtgcagcatgatgattgtaacaaccttttcttttgatgacagttctaaatggacacggtatgctatgataatgccagtttccaagaaagaattggttgctggaaaatttatggtgctggctatcttctgcgccattggcagcctctttgggctgattattggttttatcggtggcctaatcacagataaaatcgtactcgacatagtagggattggagagcttctgtttttgacactcgttgcatgggtaatctcccttatttttggaagtatgtcaattcctcttgtgttcaagtttggcgcagaaaaaggccgtgttctgctattagtatcattcctcattccggcagggatttgctttggaatatatcagcttcttactatgctgggagttgcattgacagaccagattgtatttattcttctctgctgctcaccgcttctggcgttggcatggtgctatgtgatgtatcaaatcagttatcgcatttttgtaaagcaagagctttgatttctattgggaggtatctatatgggaagcagaagatttgaaattactgaaaccgcaggaagtgtgaaaggcttttatgtggtagtggacagagaaaccggggtcaattaccttgtggcaaagtttggaactggcgggggtatttgtcccttgattgacaaagacggaaaaccgattatcagcgagtagcaaagccagccgagccagtcaacggtcaagataaacagcgcatactgcgctgccgttgacagccccgcccgcctttgcagataggcaatcaaggggcgacagcaaggagtgctgccgccctttcccataatcgaagaaagggggattttccatgactgaatacgaagcctatcaagaacatatccgctatacccatgatacctattgccggattgttattcgccatgcgtcctttgacgctgcccgtatgctggcggcgagatggaaacgggaaatctcccttgaatatctgaccgaagaaaagtttgtccaactaagcaccacagacgagtattttcaagtgccggactatggcgaaacttatccgttctctgtccgggggcagacgatacttttagatagctgttctcttgcggctgctcttgcccgattgccggaacagacgcaggaagaaatctttttgtactactttcagcacttgacgcagaaagaaatcggagaacaaagcggctggacacgcagcacaatcgggcggcatatacggcttgccttgaagcggctgaaagaggaaatggaggtgctgtcccatgagtaaccgacttctcccctatgacactatcataaaggcacatgagggcgaccccatagcgatacaagccgtccttgaccgatacgctggatatatccgctacttctctaagatgaacggctattacaactctgatatggaggactacatcagaacaaagctgattgaaagcctgttcaagttccggcttgaccgataacatagaaactgaatatcccgccgccccgcagcggcacatgaagcagtaaatccgaaaaagatttgctgctttttttgcgctcatttttggcaaatttccaaaagttccgtattagatagtgaaaccaaaaaatgccgttttttttagacagcgggcaaaacgcagcttccgaaacgccttattgtcgggaaagaccgagccgccggaaaagttcttgccggaaagtccgtcatttttgctttttgcggtgttgtagggagtaagggaagaacgccagcccgcagccttttataaaaaagctggttgcgatttcctgaaaaagtggcagtaggaagtgagtggcagtctggcagtttcttagagcaagattctaccgcagtaccaaaattcgcttatcgctcattttgcccctgcgggaatcttgttggagagtgccttccccaaaccctgccatgtggcttacgccgcttaaaaatccctcaaaatattttttcggatttttcaaaaacagttccgcttcacaccctgtttttctcctattagtgagaggacaccacgcacagaaaggaggtcaaccacctatgaaacgatacaacacgccgcaccgcagccgggtagtcaagacacgcatgaccgaggaagaatacgccgagtttgcggaaaggctttctgcctacaacatgagccaagccgagtttatccggcaagccataaccggggcagccatacgccccatcataaccgtttcccccgccaatgacgagctgcttgccgctgtcgggaagctgaccgccgaatacggcaggatcggcggcaacttaaaccagatagcccggacgctaaatgagtggcgcagcccctacccgcagcttgcaggggaggtacaggcagcggtttccgaccttgctgccctaaagtttgaagtcttgcagaaagtgggtgacgctgttggcaacattcaaacatatcagctctaaaaatgccgactatggcgcagcggaagcctacctcacatttgagcatgacgagtttaccatgaagcccacccttgatgaaaacgggcggctgataccgagggaggactaccgcatttcttccctcaactgcgggggcgaggatttcgctgttgcctgtatgcgggcgaatctccgctatgagaaaaatcaaaaacgggaagatgtgaaaagccaccactatatcatcagctttgacccacgggacgggacagacaacggcttgaccgtagaccaggcgcaggagctgggcgagaagttctgtaaagagcatttccccggacaccaagcccttgtatgcacccacccggacgggcataaccacagcggcaatatccatgtgcatatcgtcatcaactccctgcgaatttatgaagtcacgcttctgccctacatggacagaccagccgacacacgggagggctgcaagcaccgctgcaccaatgccgctatggaatatttcaagtccgaagtcatggagatgtgccaccgggaaaatctgtatcagattgaccttttgcatggcagcaagaaccgagtgaccgagcgtgaatactgggcgcagaagaaagggcagcttgcccttgataaagagaacgccgccagagaagccaccggacagccgaccaagcccaccaagtttgaaacggacaaggcgaagctgcgccggacgatacggcaggcactttcccaagctaccagctttgacgagttttcttcccttttgctgtgggagggcgtgaccgtcaaggagagccgggggcggctttcctacctcacgccggacaggacaaagcctatcacagcccggaagctgggggacgattttgacaaggctgctgtccttgccctgctcacacagaacgcccacagagccgccgaacagaccacagccatacccgaatacccccacacacaaaagggacgcttgcgggaggaaaaaaccacaaaaactaccccggcagacaccaccttgcagcgcatggttgaccgggaagcaaagcgagccgagggcaagggcgtaggctatgaccgctgggcggcaaagcacaacctaaagcaaatggcggctaccgttacagcctaccagcagtacggcttttcttccccggaggaattggacgaagcctgttctgccgcctatgccgccatgcaggaaagccttgcagagctgaagcaggtggaaaagacgctgaacgggaaaaaggagctgcaacgacaggtgcttgcctattccaagacccgccctgtccgggacgggctgaaacagcagaaaaacgccaaagcaaaatcagcctaccgtcagaagtacgaaagcgactttatcatagcagacgcagccgcccgctatttcagggagaacggcatttccaagctgccgagctataaagccctgcaagcagagattgaagcccttatcaaagagaaaaacagcggctacaacgattaccgggcaaaacgggaggaataccgccgcttgcagactgtcaagggcaatatcgaccagattttacgccggagcgagccgcaacgcagaaaggagcagagccatgaacggtaatatcccccgcatggactaccgccagtaccgggcagcccgccgccttgtgcatgagtgctgcaactatgacagcgggaattgtctgctgttggaggacggcgagccttgcgtgtgtgtgcagagtatcagctattcgctgctctgccgctggtttactgccgctgtcctgccccttgatgaagcactggaggccgccctcatgcgccgggaaagccggaaacgctgcgctgtctgcggggcgttctttgtccccaaatccaaccgggggaaatactgcccggactgcgccggacgcatgaagcggataaacgccgccaaacggaagcggaaacaaagggagaaatgtcacgctttagggcatttcaaacccgcataaatcaaggcttttttggagggtgtcaaagggtgcgtgatacatttatccttttcccccgaaaacgccccctaaaagcgtaacagaacccatagacagacaccacaaggaggtgaaccctatcgctgattatatgaccgcagaaacggagctgcccgcttacctgccttacccccgtttcctgctgaaaatggacatatcccacaccgccaagctgctgtatgtgctgctgttagaccgttccaccctttcgcagaagaacggctggcaggacagcgagggacggatatacattgtctaccccatagcagagatagcggaaatgctggataaaggctgcaccaccataaagggcgcactgaacgaactggacgctgccgggctgctggaacgcagacggacgggcttttctgccgccaaccgtctgtatgtgaaagtgccgcctattccagtggtacagttttccgaccaactgacggacggaaaaccgaccctcataagggcgggaaaccgaccaactgacagccggaaaactgaccttatgacggtcggaaaaccgtcccctaaccaaactaatataaacaacctaatagagagccaaacaaaaagagcgagtgaggggcagccccctgccgcttatggcagatataaaaatgtattcctttctgacgcagaacttttggaactggaacaggacttccccggcaagtgggagtattaccttgaccggctttcctgccatatcgcttccactgggaagcagtaccacagccatgcagccaccatttacaagtgggcgcaggaagacgctgccaaaggcaaggctgccccgaaacagggcatacccgattattcatgcaaggagggcgagagcttatgaaaaacgagattgaagctatgattacggacattacagccactaccgccgaagcggaggactacacaggcgaggacgggcttttatactgcggcaagtgccatacgcccaaagaagcctactttgcagagggaaagacctgtttcgggcgtgaccgccacccaacagactgcgactgccagcgagcagcccgtgaaaagcagcaagccgccgaaagccgacagaagcaccttgaaaaagtggaggacttgaaacgccggggctttaccgaccctgctatgcggaactggacatttgagcatgacaacggcagaaacccacagaccgaaaccgcccgcttttatgtggagagctgggaaaccatgcaggctgaaaatatcggctacctgttttggggcggcgtggggacaggaaaaagctaccttgccgcctgtatcgccaacgcccttatggagaaagaggttgccgtctgtatgacaaactttgcaaccatactcaatgaccttgctgccagctttgatggcaggaacgaatatatttcccgcctttgcagctaccccctgctgatacttgatgattttggtatggagcgaggaacagaatacgggctggaacaggtttacagcgtgattgacagccgttaccgaagcgacaagccgctgatcgccacgaccaacctcacgctggaggaattgcagcacccgcaggacacgccccacgcccgtatctatgacaggctgacttccatgtgcgcccccgtccgcttcacgggcagcaacttccgaaaggaaaccgcacaggaaaaactggaacgcttaaagcaactgatgaagcagcgaaaggagagcctatgacagaaacgaaacagacaagcaccaccaaaacagaccgccgcccggactgtgtaacggaaatccgcatgggcaattccgtccttaccgtttccggcttcttcaagcagggcgcaaccgataccgcagccgacaagatgatgaaagtgctggaagcggaggctgctgccggacatacgccaccgttcagcgcataagtgatgacatggaaaagcggtcacgccggggagcatgaccgctggaatatcagtaacaactttattttttccgaagtttcaactcaatgccttttggagcagctatatcctgcaacagttttgcgataacagaagcctgttctttcttccccatactttgaaaatccttatcggatttaactgtttgcaagatattttcaatttctttaatcgttaagagattgactgcaacacagaatagattttttctgcgcccgtcattatagtgtgacaagaggaaatccaataatttgcgcttttcttcctgttcagcattataggcgggaatccctatctggctggctttttccatgtcattcatttgattatgatgagttataaaagaatcaaaatcatctatatgagcgtatttgtcacaagggaagctggtacactgaaagcaatattcgattttcccatgttcaatactgcactttgcgattttacaactttgattatcaacgccgcaaccggaacaatgccctgccaaattcataggacataatttacaatttagaccacaaagagaaaggtactgattgttacggacaaaccctttcattgtcacacccccttgtattgattagctccattttaccataagaacaagagtttttctactatgcaatcccaatcatctgctacacaaaaaacggcgatttgaccgaccataaagaagcagatttgacgcttttgccgctatacagacagccgccccatgtggtacaatcaaggtacggaatagtggggctggctgtcggaaacggaggattttatgttaagacagaccaaccaacaaccaattaccgccctttacccaagactttcccatgaggacgagctgcaaggcgaaagcaattccatttccaatcagaagcgtatccttgaaacctatgcaaagcagaacggcttttccaatctgcgctggtacacggacgacggttattctggtgcgaactttcaaagacccggtttccaagccatgcttgcggacattgaagccggaaaagtcgggacagttatcgtaaaggattattgtgcgataataggactaaatcagaaagaccttgaaaaccaaggcattctggcttagtcccttctttttttgaccgaaaacaaaggactttcacaataatcaagcaagccggagggtgccgctgcacacttccggcagaaggaggatatagtgggtgctatcaaagtcttcttgaaggaagttgtgcttccaatcgcgcttgcgttctgcctcgcgtcatttctcaagccgatctatatgcctgacggcgtatgcgactacttcctaatgtggatctgcgtcggcttgccattcggcatccggaggatgtgcctctggctcgttccaagcggttacggcatctccggctcagtcggcattttcgcattgaacttaatcataggcggtctcatcggaggactcgccttcttcatcgggctgctgctcggtatcattcataccatccgagaaatcatctgaactacatcgtaaacgaagagggtttgtttcttctccaatttggagtaagaagcaaaccctctttttttgttgcccaaaagccggagtatttgctggcgatgcggcgaaagaaaggagtttttaagcatgaaacgcatgacagccggtgatctgcaagcactggaattgctgatgcagaccacacccggctttgagcattttgacagcggcgcggatggcattctccctgagtgccgaagctgccgctttcatcgccccttctggaaatatcagtcctgcgtgtttgcagagtgtccctactgctgcaatcccgtttctaccctcaaaaaccaaagtggcacatctgctgccggaaaggaagtcaatcatggataacaaaatcgaagtcttcaagaatgaacagtttggagaaatccgaacagccctgatcgaaaacgagccgtggtttgtggcggtggacgtgtgcagggctttggagatcggcaattcgtcacaagccatttcacggctggatgcggacgagaagatgattaccctcatttcaaatgagggtaataaacgaggcaatcccaacatgacggtggtgaacgaacctggactttacacgcttattctgagcagccgtaagcccgaagccaaagccttcaaacgctggatcacacatgatgtcatccccatgatccgcaagaccggcggctacatgacggactcccttctggaacgtattcagaaggaaccagcggtcattgtagagttcgctcaagcgttgattctggaaaagaatcgcgtgaaggctcttgagtgtgagctgaacacggcaaagcccaaagccgattactacgacgccttcatcaatccggatgactgcaccaatatccgaacgacggcgaaggaactgaaaatcccggagcgcaagttcgttcagttccttctcaaagaaaagtacctgttccgctctccttccgggcagcttcttccctacaacaaggacagcaatgccggactgttcatcgtccgcgattttatgacgtactgctacaccggttctcagacctacttcacgccgaagggcaaggaggtcatccgaatgaagttccagaaaaagtgcggcgaagagctgcctcccaagatagcaaggtgattttcgtggcagtctatcgcgtaaacaagaatcgtggctataccgtcatggcgaacttccacctccgagacaagagcctgtcactcaaggcagtcgggctactctcaaagatgctctcgttcaatgatggctggaagttctcaaccaaggggctttccgcaatctgcaaggaaggtccggatgccattctttccgcgctccgtgagcttgaaaagcacggctacctcgtcaggcaccggcagagagacggtaaaggcaggatgagcagcacaatctttgagatatacgaagagccgcaggagtcaacgccagaacgggaaatgccacacacgggaaatccatgtgtggagaagccagatgtggataatccacacggggataagtccgcacaaataaatactgatcaagtaattacccaagaaagaaataatctctcaaagaactatcaatccatcaatcttgatgggatggacaggatggatgagcgacgcgagtatgaagagattatcaaagagaatcttgactacaacattctctgtcaggatccgaagttcgataaagaccgcttccgggagatcatggacatcatgctggatgccgtctgctctaacgctccgaccatccgtatcaatggcgaggatatgccgcagcaagtggttaagtcccgctttctcaagctgaatagcagccacatagagtacgttctggaagcaatgagcaagaacccgtcagacatccgtaatatccgggcgtacctgttgaccgctctgtataacgcctctctgacgatagacaattactactccgccctcgtcaaccatgatttctacgggcaggacagatcggcagggtcaaagaagccgaagtcctacgattatagcctttgtgaagacactctttaatgaataccatcgtgagcaatgctcggaaaggaggacagtgtaaatgaaaatcatctatcgccggattgtgccgccttagcttcggcatcagtccccataatcattccaacgaaaggaggtaaacgccgcaatgcaggatgaagtcaacaccaaagttgttgcaatcatgatcaagggcggcaaaatctcagccgaggtgctgaaaaaggcactggacaagttcgtgcaggagattgagaaggcgcagaagcagatgcagcagccaaaaacctatcgcggcaagcagtccatcaagcatctgatgagccagaatgccgccatctccaacattgaagtgacggacggcaacatcaagtcctttgagcggactgccagcaaatacggtctggactttgcgctcaagaaggacgtttccgttgagccgcccagctatcttgtcttcttcaagggacgagatgttgatgtgatgaccgccgccttcaaggagttctctgccaagacggtcaagcagaaggaacagccgtctatccggcacaagctggatcaggagaaagcccagagcaaagcgcagcacaaagagaaagtcaaggtcaagaccaaggatcggggtgtggagctgtgaacaaacccgatgtgaagaagctcatccttctgaaccttccgtatgtcttcgccttctactttgcagataagatcgccgccgtgtttcgtctcgcccccggcacagagttcattgacaagctgacaaacgactttgccgtgttcggctctgcctttgcaaatccgttgcccagctttcatcccgtcgatctgctcaccggtctgattgccggtgcgttgctcaagctggcggtctatgtcaagggcaaaaaccgcaaaaagttccggcagggcgaagaatacggatctgcacgatggggcaagccggaggacatcaagccgtacacggatccggagttctcgaacaacgtcatcctaacgcagacggagttcctgaccatgaacagccgcccgaagcagccgaagtacgctcgaaacaagaacatactcgtcatcggcggttccggctccggcaagacaaggttttttgtaaagccaaatctgatgcagatgcacagctcctatgtggtcactgacccgaagggtacggtgctggtagagtgcggcaggatgctcgaaaagggcggctacgtcatcaagtcgctgaacaccatcaacttccggaaatccatgcactacaacccgttcagctatatccgctcagagaaggacatcctcaaactggtcaatacaattatcgtcaacacgaagggagatggcgataagtccggcgaggatttctgggtgaaggcggaaaagctctactacacagctctcatcggctacatctggtatgaggcacccgatcacgagaaaaactttactaccctgctcgaaatgatcaatgcctcggaagccagagaggacgatgagaccttcaagaaccctgtggatgtcatgttcgacgagctggaagcccgcgaccctgaccactttgcggtcaagcaataccgcaaatacaagctggcggcgggcaaaaccgccaagtcgatcctgatttcctgcggcgcaaggcttgcgcccttcgacatcgcagagctgcgggagctgatgagctacgatgagatggagctggacaccatcggagaccgtaagacggcgctgttcgtcatcatttccgacaccgatgacaccttcaatttcgtcgtagcaatcatgtattcccagctcttcaaccttctctgcgacaaggcagatgacgtttacaacggacggcttcccgttcatgtgcgctgtctgctcgatgagtttgcgaacatcggtcaaatcccgaagtttgataagctcatcgcaaccatccgaagccgggaaatctcggcgtcaatcatcttacagtcccagtctcagctcaagaccatctacaaggatgcggcggacaccatcacgggcaactgcgactgcacacttttcctcggcggaaaagaaaaatcgactctcaaggaaatcagcgaggtgctgggcaaggagacaatcgacctttacaacacctcagaaacccgttccaacaacaactcctatggcttgaactatcagaaaaccggcaaagaactgatgtctcaggatgagatcgccgtcatggacggagccaagtgtattttgcagcttcgaggcgtgagaccttttctcagtaacaaatacgacattacaaagcatccaaagtaccggcagctctccgactataacaagcggaacgcctttgacatcgagaagtaccggcagcacaagctggtagtcaagcccgatgacacattcgacctctatgatatgggcgaggtcgaagcggattaaagccccgtcgctgcactgcgcagtgggtaaagcctgatggctcccaaagcagaacagcgacggggcttctttttttatgcccattttcaaaaatacacaaccaatctttttcaaatcaaggaggaaaatctatggctttcatcaatcaggctgtcacggttcttcagacgctcgttatcgccctcggcgcaggtctcgcagtgtggggtgttgtcaacctcatggaaggctacggcaacgacaaccccggcgccaatgctcatgtgccataaagtaacacgcaagaatttgatagacagcaacccactattccgttattaccttactcacacaccttgtaactttttcgttaagcctattgactctgatacctcggaagagatataatatagttgctacttagctaacctaaatagcgaaactaaagagaggcgacgatatgaataacaaatatgtccagcaattcaaaaaaggctctctggaaatgatactcttatgcctaatcggacgcaaggaaacttatggatatgaaattataaccgaattgaacaatagtgcgtctgttttgggatatgcgaaagagggaaccatttaccccattctgtatcgtttacaggaagcagaactaatcaaatgccgattggctccggctgcggcaaatggcggctcaaaaaagtattattctttaactgataaaggcaggaatgtacttgatgaactaatcttattttggtcaagctatgaaaactgcgtaaacggctttatagaaagttatcaacaagcgagggtgtccaaatgaaagaacaatatatcaaacaggttgaaaaggaactatctttaccacgcaaaatgaaaaaagaggttgtgcgtgacttgaatgaagtttttgcgtctgctatggagcatggagaaacagagcagcagattatccagcgtttggggacgccaaaagaatttgcagacagcaccgcagaacagtttggcattgataataccaaatcgaaaaaaaggaacggtatcatttctactcttgctgcgcttgttatcgcggttgctgccttttcggtatatgctgttacgcaatcaggaaaagtaccagaaggagcaatcggacaagcagacgcgacaacaaatatacagattgagggcgcgtttgcctttgatatttcgcaaatccttttggctattgggtttgcagcaacagctattgctgttttgttaattatccgaaccatacacaaaaacaggaggtaaccaatgaaaaagtatatttctgtattcacaatcatggttatgatttttttggctgcgtgttctaatcaaaatacatcatctacaccgacaagcaatgagaacaatacgcaatctaatagtgttacaaaattggacgagggtgtttggcctgcgaatgaatacacagaggggcttcctgttgcgcctggtacggttgcatgggctacacttgatacagaacatgagaattgcaatatcaaccttaccggcattagcgaaaacgactataacgagtatatggagcttttgaaccaagaaggcttttccgtaattgaaaatgtgtcagaggaaatcgagggagaaaactatgtttctatcgggacgcttttatcaaacgacgaaaagtggttaagtatcagctacatacccaatagtctaactatctacatttcctttgacaataactgaaagaggtaacggaatagcaaagtcagccgagccagtcaacggtcaagatgaacagcgcatacgcgccgccgttgacagccccgcccgcctttgctggcaggcaatcaaggggcgacagcaaggagtgctgccgccccgcactattatcagagagggggaatttccatgaccgaagatgaagcctacaaagtgcatatccagtacacctttaacgccttttgcaaggttgtcattcgtcacgccgccatagatataattttgaagctgcgccggaggtgggaacgggaagtttcccttgactatctgatgaatgagaagtttgtccagtttgccgagccggagcagcttgaagaatatctttttaccgcctgcggccagaccgccgttctgtaccatgcggaacttgccgccgcccttgccctcttgccggagcaggcacaggaagaaattttccgctattacttcctgcgccagccgcagagagtgatcggcgtacatatcggccggacacgcagcacagcggggcggcatatccagcttgccttgcaacggcttcggaaggaaatggaggtgagccggtatgaataaacttctcccctatgaaacaatcgtcaaagcccatgagggcgacccggacgcaatcgacaccgttctttcccactacgccggatatatccgctactgttccaaagtacacgggaaaatcaacaccgaggttgaggaatatgtgaagcagaagttaattaccgcgctgttcaagtttcgctttgatcgatagtaaacagaaaattaaggaggcaagagattttatgaaaaatcagcttttaacagtgacggaagttgtagttagaagtgccttttacatcatcacaaactatgtatttgttagcatgggactgtcgtttcatactcattggattgcaattctatttttactttcaatggtatgggctactattgactacggcaagtctgtaaacaaaataaccgggaaaaaggttattgctgaaatactatgtatatgctgtattgcgataagtatagcgattgcatattttgtgggatatattcaaggagcaatcgtttccttttgaaaacataatgtaataactctccgtttatcataccaatatgaaatgagttttcaaaactgaatatcagccgcccaccggcggccagtgaaagcagtaagtctgaaaaagatttgctgctttttttgttgtccggctccatttccggccattttgccctgttcagattgtagtagtaagtgagagggaaatttttctgctccggcgtttggcatttttgatttttgtccgtagtaagaagcaaagagaaaatttcccgtttcgtttggcaaatttcaaaacgcggtggtgtggggagtgaaaggaaaaattctctgccccgctggttgccaaaattcactttctcgcattacagaagcgaaagaaattttgaaaaatccccgtccagcgggtagctggcggcctttgaaatgtatctttagcggaaagggaaaaagccgcagccagcgggcagcaaagccccgttccggcgtcatattggcgaaaggaaaaaagaccgcccacagcgggccgcaagccccgccttgtccgttctatgtacgaaaaaacccgacaggggcagtctgcggcagttacagagcaagattctaccacggtgccaaaatccgcatatctgcggttttgccccctttggtaaatcttgttggggagtgccttccccaaaccctgctcatgcgccctgtcgggcgagaaagaaggtcaacgcttgaagaaaaaatacaacacgccccaccgctgccatgtggtcaaaacccgcatgaccgaggaagaatacgccgactttaccgagcggctgaaacactatgacatgagccaagccgaatttatccggcaagccattacacgggcgaccattcgccccatcgttaccgtttccccggccaatgatgaactgttgtccgccgttggcaggctgaccgccgaatatggaaaaatcggtggcaacctcaatcagattgcccgcgccctcaacgagtacggcacaccatacaacgccctgtccgttgaagtccgcgccgccatttctgaccttgctgccttgaagtttgaagtcctgcgaaaggtaggtgacgctgttggcaacattcaaacatatcagctctaaaaatgcggactatggcgcagccgagcagtacctcacctttgaacatgacgagtttaccatgaagcccacccttgatgaaaacgggcggctcatgctcagggaggactatcgaatagccacgctgaactgcggcgacgaggattttgccgttgcctgtatgcgctccaatctccgctatgggaagaaccagaagcgggaagatgtaaaaagccaccactacattatcagctttgacccacgggacgcggtggacaacggtttgaccgtagaccgggcgcaggcgttgggcgaggaattttgccggaagcagtttcccggacaccaagccattgtctgcacccacccggacggacacaaccacagcggcaatatccatgtgcatatcgttatcaattctctgcggatagccgaagttccattcttgccctatatggacagaccggcagacacccgcgccgggtgcaaacaccgctgcacagacgcggcgatggaatacttcaaagccgaagtcatggagctgtgccaccgggaaaatctctatcaaatcgaccttttgcatggcagcaaaagccgcattaccgagcgtgagtattgggcgcagcggaaagggcaggtaaagctggacaaggaagctgccgccttgccagccgaggagcagccagccaagcccacgaagtttgaaacagacaaggaaaaattgcggcaggccatacgcaccgcgctgtcctctgccgcaagctatggcgagttcgccgccgttctcttgcaacagggcgtgactgtcaaggagagccgagggcggctatcctacctcacgccggacaggacaaagcccattaccgcccgcaagctgggagatgattttgaccgcgctgccgttcttgcccttttggaacagaacgcccacagagccgccgagcagaccgcaaccgtacccgaatacccccgcaacataagggagcgtttgcagggcaaaaaagctgtccaanctcacgccggacaggacaaagcccattaccgcccgcaagctgggagatgattttgaccgcgctgccgttcttgcccttttggaacagaacgcccacagagccgccgagcagaccgcaaccgtacccgaatacccccgcaacataagggagcgtttgcagggcaaaaaagctgtccaaaccaccccggaaaaggacggtattcagcgcatggttgaccgggcagcgaagcgagcggagggaaagggcgcgggctatgaccgctgggcggcagtccacaatctgaaacaaatggcggctaccgttgccgcctacgggcagtacgcctattcgccggaggagctggacgcagcccttgtatccgccaatgcggatttacaggacagcaccgccaagctgaaagccctggacgctgctatccgggagaaaaaggaacttcagacacaggtgcttgcctatgccaagaccaagcctgcccgtgacggtctgaaagc
